United States Patent Application Publication US 2026/0058010 A1 - sequence listing, part 26

SEQ ID NO: 310 - DNA, 326185 bp, Homo sapiens
  source 1..326185: mol_type = genomic DNA
aggcctggatcagacatcacagggggggagctgagaagaaaatatttaccggctcagtcctccttggccctggtagatggaggcaaggactggcaaagccctccccaggccagctcctcccagctgggcccccacagccagctccccacactacctacagcaccccaactccaatttctagcaaggcctcaggcctcaggcctttacccgggggagcggagggagggtggaggatgaggattgggccctcaggcctttacattcagacaggggtggaggaggagggcaggtacagatatttcctctgaaactcaaaaccaggtaaaggggatgtaggggaggagggagaggtcggggaataaaaaccagattaggagagcggtcggggtggagaagactgtgcccagagtgaaatattctagcataatggaaaagccctcattgggggtcccacacgcctctggccaaatctcttctattagggttagaagttagggtctgtgtagacagcatgtgtagaccgagaggtggtgggactgagaagtcagtgtagacagtgtgagagagagcgagctgtggtgggggtgagtagtcggtatagacatcaaaggctggtcaggctgttaaacagagaaggcttcctggattcctaagggtcagtatgaacagaaaagtcgcgcgccccaggagaggcagggctgactcagaaggctggtggacactttgcagggctctccctggtccttcagaggtgtggacaattcctgctcctttccaaggctggagtgtcataaagagggcggaagctgaaagacgattggactttttccttctcaaacttttccgccagtttcctcaggtgttgagagcagacggggagctcgcctcagtcccgggcccccaaccctgggccagcaaggccaggaggccacggcggagcagcccgtgccacgcgccgtgcgtctgccgggcgcggccgcggagccaggcgagccgggggccaccgcggggggcgggggcggcggacggacggaccgacggacacacccgcgagcactccaacctcggacccggcgcgcggcagccgggaatccctcgggccggggaaactgcgcacggggcccggcctggccgggccgggccagagggccccgcctcccccacccgccacccccgcccactcgggcgcccgtgattggctccgcccgcccctggctgcgcgccgaagcccgcctccctcgcagctaaagcagacggtacccggagcggagcgagccagaagggagcatggtccccgcgccgcggccgcgccagcccccgcgccgccgccgccgtccccgccaccgcggatctcgccgcagctccagccccggccccggctccgcagcgcccgtccgcagccccggcggtcgccgcgcttgagcgcagcccccgcccggagcccgagccgcgagcccggagccagccccagccccgcggccgccgcggctgcggggagagggcgggggcgatgctgccggagccgccgccgccgccgccgcctcgatgagagccgcgccgcaccgctcatagccgcacaggctgacaggcaggaggaccgacttccctctcccgggcatcctccctgggctgccgggaggcggcggcggcggaggaggaggaggaacgaggggagaaggcggagagcaggaacgcgaggaggaggacctggatccgtttcctccggccaggacccgagcggccccagccaccgctacccgccggcgctgtccgctctccatcagccctcctgcgcccacccgcgaccccgggctctctgcgcgtcgggccggggccggagccgcgcgccggaggtaagagccgggccgggctggagcgcctcggatgcggcgccggagggagacccaggtcctggccgccgcgtggggccgggccgggccgggcgtgggagcggggccggaacccggaaccctgggctcggcttcggcggcggcggcggcgacaggagcctcccgcgtctggactcgcaggctgcaggagcccttgcgcctgcgctgctccagggggaaaaaaagggggggaaaaaacttcctgcccccgggtgtgtatgcaccggggctgcctggggccactgtcacggtgttcggaggtgctggaggcttgtgtgacccctggccggagcagcccccctgctgggcccggcggcgcgcgcccctctccaggccacgttcccctgagcggcccagggccccggccgggcaggagacctggaggcgacggagggctggcccccaggggcggccgcgcgcactgtcctttggggaggtgcgcgcctctgtgcagcgagaagccaggttggggttttctgcccctcgcgtcctctgatctcgcatttggggactgggtctctttactcaatcccaagtaactttcgaggtagatgagctcgaaaaccgtcgggagggaacccgcacagaccttattgtgacccaccccaccccgacacacacacgcacacttcccttgacaccttgtgggtgccagcgtgttgtggggggacgcggaaaggagagctcacggggacggcgaagcggccaggaggtggtgtcgttggggaggggttgttgatgtgtgggacagggtggacctggagatgtgtagtgtgggagtgtgaacgcgcgccccgatggcctcggggggccgggggagcccagggctcgcgtcccggtctccgtggcctggagcgggctgagagcgctagggttatctgcggtcgccgcgcgggtgcccgcgctgggcagcgtcggccccgggccccaagggagggacgtgctcgcctggggccggagcgcggggctgggagccggggtaggtcggaggtggctcttagggcaggtcgcctctgcgttgcctggggaaggcggggacgcgctgcctgcctgcggccagccgtctcggaggagggggtggcggccacgcgcgagtctcggatgcctgggtccacccgctgagaagccagttgtcgtccctgggctgtggaaccaagcggcagacgcggtccgttggcgggccctcgcgcgggcccccagagatgctgatgggtaaggagctgccgccgccgccgctgccatccccgccgctctgcaaacgttctcctccctccctcccgtgcttgcgccgcggcgcgccccgggcgaatcgtggacgcaggtatttatgtagcattaggcgagacctcggcgctggagggaccagaccgtggaggacgccgagctgctgctgcctgcgaaacttccacttcggcagctcagcggcatcccggcccgctgctgcaggttccagcctctctccagtccagcaacgctgggattcggactcctcttgcaatgacagatctgtcctggttacggctgtatttatactagtttcagtctctttaaagtcatctgtctagtcactacagagtttcttcctcgccgtgtggtcttatcactaactcagccctgggagggcagatttgaggaattgcttcattttcagatgaatgacagcagacttgtcccacctcattcctgatttattattattattattattattattattattattattattatggaaagaaggtatagagctttttaatttttttgtgagggaggagaatgaacaattttatagattgttctttccgacacttagagaaaacatgtccagtaagcactagtgaatactttaaaggctggttggcatgcgtgtatttgattagtccataatctaggtgtttatacaggtatggagctgtgtgctactgatgaatagtctccgtcccatacattgtgctggagtgcacttgatttatcaccctgctataaatcagggaattactagcacatgtgccttttaaactctatatgaatttaatggcatttaaattggtttatgggctgatgcatctaaccaattttaataacttttctgcacaaacatcttataaaccatatttgcctgtgattaagaaaaacattttcttctcctcggtctctcggttatggaaatttataggtctccaactttcatttgcaagcagcaatccaaacgaaatacctagagttttactgaaataaaatatcctatggtagccatggtaacaaatagattaagggttattggttttcatctgaatgtgatggggggtggggatctagtgttgtgtctttttaattatgtttctaatgagtggtggtcatacttcaagtactcagtgtgggagacaagcaagactgagaattcaggtttgtgggaggtttattgaaacaaagactagtagagcccaggagaatgacttttgctaactgcagctcctcatatctaggaacaaaatggataaaaaccttttttttgtttttccagtagatgagcattgagtcagtcactttaagaccggaaaatgcattttgcttataaactattaccaaaggaacctctaaatccagcctgttttctaggaataaacatgttggaagtgtggcggttggtgtggattgagtgtcaccgttgttatcaacacctgtcagtttaagtgaggcacatcattagtctattcaaatcttgcctatttcagtattcatgcatttccatggtgatccattcatttttatttagtcaaccttataaatctttggcatcaattttagttgtgccatctttttccttcttttatcaattgatttggctacaaaccattcctagtttaaagtatctccttcttttttcctgctagtttctaaaagcctacactattcccagctacatacagatataaaggagttaattttttttcatcaactcaaatggcacccctaatactaatgtcattttttggcatctcatttgatatgtatgtgtacatgggttttttttttctttctttcagcaggcttactgtaaagctttctcactttttggctgggagacatcaattcagtccagcagaactaactaaagtttttccttccttcctcctttttgcttccttcctttttttctttctttcttcttcttttttttttttttttttttaaaatcccagtactgttatggcttaggcattctttgtgtcatcggttgtatctggcttggagagacttcgagactatattagagcaggtctgtcctggggtcttttctagtagtggtcaaagccagaagttttcagaacagcagaggattttccaaatacaatatatatttagtcacagcatatagtgcccctaggatcatagtaacattgtaagtccactgaacaggcagttttacttaaatgcgagtgatgattttgctcacccactttcaacttagctttctaatgatgcaatcccatgctaatcacaaccctgtatatttcagaaatatcaaggcaagcattagcacgctactgacttattaggatcaggcaaagtaattggaacacttaagttcaaagtcagatgaagaaatggaattataaccaactttgtgattctgtaatcagtcaactaagtgcctacttggggataggaggaggaagaaacatcatgaataagaaatccagcctttagttgtgctgaatgaggataaaccaaggcagttactgtgtaagaggactggagaacaagaaatgtgttagtggatgggaggactgctggagcccaggaagttgaggctgcagtgaacagtgatcacgccactgtactgggcaacagagcaagacctagtctcagaaaaaaaaaaggggggggcggaatatatgtttaaacagataaatcatatgtttcccaggcctgtcttagcatctttcactgtgctagacacatatccacgcaaatgtttggaagctggtagaatatctgtagtttgtgtagaagatagtcagtttttatttcttaagtaatctggggtcatcgcctgatgtgctaaaaaattaggtagcataattcctggaatgtacttttgtctgaagtaaattttaccatagaaaatggtcttaattttggttaacaaggaaagatgtatccaaattctttacctgcaccttagatcaaaaatgctgagatcaggaccaccctgaaagcaaactctgtggttcttcctacaaccgccacaggcttacttctcccacagtaaatgcagcctgtactttcttcaaggaaaccacttgaaaacaggaaaactgaaactgccaattaagatgaggcaagttgatcactggaagtagcaacagagttctttgtgaaatcaattttatcgtttgggagcatttccacctttagggtagaaaggagaagagttctcattttctgtgcgagagggtatctgcatgaaattcaagtagttcagagactctcgactgtgcagctgcaaatgatgactcacaagctggaacaagaacggcgagcatggttgtaacggccggggatctagcgtgcgcaaagacgacagccgctaggccatttacaggctgccattggcctcacaggtgtctattgttatgatttgtaggtttttgacattttaaaatcactgatcattttaaggatatatgtatgtgtatatatatatttgtaaacagataatcacacatatatatacacatacatatatatagttatatatacacaaatatatgttctgtcactttgtttaaaccatggtttaaaaacacataaaatttaccatctttactttttttttttttttttttgagaaggagtttcactctgtcactcaggctggagtgcaatgacacaatcttggctcgctgcaacccctgcctcctgggttcatgagattctcctgcctcagcctccagagtagctgggattacaggcgcctgccaccacgcccagcaaatttttttgcatttttagtagagacggggtttcaccatgttggccaggctggtctcgaactcctgacctcaggtgatccacccgcctcagcttcccaaagtgctgggattacaggcatgagccacctttaccatttttaactgtgcattcgtagcattcacattgttgtgcaagcaagctccagaacccttcgtcttgcagaactgaaagtctatacccgttaaacatcatgtccccattcctacctccctcagcccctggcatccgccattctacttcctgtttatacattcaactaccttagatccctcaggtgagtggaatcatgccacattcatccttttgtgatgggcttgttaaacttagcataacgtcttccaggtttatcacatcttgtggcatgggacaggctttccttcctttttaaggttgaataatattgcattgcatgtatgggccacattttgtttgtccattcatctgttgatggagatttgggttgcttccatgttgtagctactgagaataacgctgctgtgaacaggagtataagacatcctgttttcagtgtttctgggtctatacccagaagtggaattgctgctattttgatgttttctttgttttgagacggggttttgatcttgttgcccaggctggagtgcaatggtgcagtcttggctcactgccacctctgcctcccgcgttcaagggttcaagcaattatcctgcctcagcctcctgagtagctgggattacaggcacgtgccactatacccggctgattttgtatttttagtggagatggggtttctccatgttggtcaggctggtctcgaactcccaacctcaggtaattcgcctgtctctgcctcccaaagttcactctgggattataggcattagccaccgcgcccagccctattttgacttttaacactaacaaattatgtaagttttcaattgaagagacttggtgagaatgcagtcacacagaatactgtccaataaagaatgcagtagatgttactgacatttgttcttccttttctgtgtatgcatttcctcccgagtgtctctgatctcatgctttccttgggggcttgtcctagttgcagtgatactgcagagggattagaaacatgggcttcctgtccacgttgaagtcccgtctccagtgcttcctagctgtgtgaccttggaaagatccttaatctcacccagcctcagttttcttttatgaaattggaagaagcagtagtggctatctagggtggttgtgagggtgaaaacagataacctccataaacccacattacagtggcctggggaagtgctttgcaaagggggcttaggaaaagtagctgtggaagaagagacagcagcaacccctagagatctcagaaactgtagatgccaatcctgttcaatttcaatcataaatgttttagtcatacaccagggcatgtatatatattatgttctgtaagtctcactatcagtacttattctgaaaagcataagacatttgcatcacaattccaatagttaaaaatacccttgagttgatttgatgtgtgaacttttaattccatctttagtatcataattttagagttgatgtggatttttgaggtcagctaatctacctattattcaatcaccaaacctttattaagccccaataatataataataatagcttccagttatggctgctcactatatccgagtactttacatatattatctctaatcctcatatcaatgcttcgaggtagggattatccacattttacaaatgaagatgaggctcagtggtaatcaactggcccaaggccacaaacctagccacgttgttcagctgggtttgaacacagatccctcagctaccagtctgtctgtgttttcctttctgcacacacacccctattcgtgtgtgcacatgcgcctatgtctttgttttttcccatgcatctgcaccacttcatactgcctgtaccaggtactgtgttgtctatactaattaacattttatgtaaaatcaatctagtagaaggaatgtgagctaaaataacaatattaatcaagtctgaccaacatgcatgataccttttggatttgcgcacctgcttccatttactgtggtttctggaaggctaatgagaaaaacttttaggtgtttgaatggcgtctgtttccatcttgagccagcatagtaaataaatagcaaatcaaagaataaaaacaatgtagaaagggttaaagattcatctagaaccactaatcgctgacccgggcttgttcatgtttgcataccgatgcatagcctggtgcctggcacaaaactctggtaaaaatgtttgcctggagaaggtgtcagataacagacatcaaagctgactttttggatgttcttttcactccgtggctgtgtagtcacatgttcatggtttgtcattgtgtggaatttttgatgctatatttgggcatatatctattaaatatgcttattgatgaattgtaatctggatggaatcttctaggatttatgatttgagactttgaagactaattctctcttggagcttcatcgttgcagtgacaacctgggtctgtctggcgcttctgagcatccgtgccgtctgtcctctctcaggggctttccttgtgggttgttgtctctgctcagatttcaaaatttgtagtagttcacaaaagcatcgttttaaggaaaaaatgaaacacctggaaatcacagaggcactttgggaagggcgataacactgtattttccaacttcttctgttctatttttattctttatattagttttttctcgagatgggtgtgaatagagcctggagcacacaccacaaaaatgtgtttgctctgttttaactctttcaacctacattcagccaaggagggacttcttcagtttgagattctccttgagaaagacgtggttgcagtgcctgggatctggaccacacaggaggtttggggtgtggggaggctggccccacctgactgctggcccggcactggcacggtcactcctgtgtagctctgctgccgcccctcccttccccctgggcttgtctctaccctagaagtaatgtcaagcatgaggcttcctcttcttgaggcttccccacaaagctcctagaagcaagttggaggtgtgggcggtgagggaagagcagacaagaggactctgtgtctctgttttgtgcaaagcatacgccaaaggcttagatcaaattaaagacccaacagcggccggaacatccctgctttccttttggtcatttagtaacactgagaagtggtgaagagcggtgaaattgggattaaaaacaaaaaacaaaaacaatcttccctttctcctttaccttcacttttcacgtcttccagctttaagcatctgcttctggatcaaacctgcagctaagcttagcctcccagggaactttaaggatatatattcagctcctggagcttctaaatgagggtagattgaataactgtttactgagaaggcacagtgggaagagcactgcctttcctgtggcatctcatttttgctcaccctgtcgcatgggtgacttcacagtggtggtattgctattctgcagctgatttagagagatccaagcatttgcccaagttcagatcaacaaacatgggtgccaggcctatgatgggtgccggatgggttacagggaggaaggatcctgtcctccagacacctgcctacctatggagaaggaagagagccaatattcccttttctaggaaatataaattgcttatttgaataaaaaaatcatatgtttagccacattgctcactgattatcacagttgacatagtaagttgaggtccagctaattttcttttaaagtgtgaaataaatttaaagagactcaccagtatgatttcaagtaccttcagacttaaatgtgctggcctcatctttgcaaatggaacaaaaattcaattctgaatttgcctgcaaggcttaggtgtatctgactcctttctttgtggtcagaaggcttcctggggtgtgctgatttggatctacgaagattaaatacttgaggattaaatgagttcctgtttgcaaagtgcttagaactgtgctgacatatgccaaatcggtaacatcaatggttatttctggactcgtcttggggatcatggtccttgaaggcaaggactttgtcttttagccttccttggtcctggcacaggctggatattcgttgttcaaatactgtgagctcaatgaattgtgttgaggtgacagaggaaggagacagggcaccacatctcaccaggaagtccatggaaatgagtggtccagtccaggaatttcccgagaaattctgtgagacagtccagagcagagagaaccaagttgtgaatgctgctgtggccgtgacccatgggtccactgggttctgcctaaccacctacattggccgctgctgctattgatttgtctctccatcacagtagagaggggtagaaaatggtgctactccagttaaggtcacagataggtgtctgtttccacactgttcccagtgtgtgccgagataaattgggaataagcatttagaaactacgattgcaggccaggcatggtggctcacgcctgtgatcccagcactttgggaggccgaggtgggcggatcatgaagtcaggagtttgagaccagcctcatcaacatggtgaaacccggtctctaccaaagctacaaaaattagccaggcgtggtggcatgcgcctgtaatcccagctactcaggaggctgagacaggagaatcgcttgaaccagggaggcagaggttgcagtgagctgagatcgcaacactgcactgtagcctgggtgacagagtgagactccgtctcaaaaaaggaaagaaaaaaaaaaaaaagaaactccgattgcattcaacactgccttggcagcatgatccgtgggctcccctcattaactaggtacagaccagtttgcatggtcttggactctcatggtgagttaccaggagagccgcctatggtgtgagtgtgagctaatcatgcaaggtaggaccacattttcgttcctgacagattggtgatgtaaacaaaaacccaaaacctgattcttcaccgcaggtaggcgtagagaactgcctggaagaaacctagctgcagttgtcttgccaaagcaagacatgtcccgtgattttataacaattgggtctagaatccctcatcagtgagaccaatattgccacctttaggttaacaagtgggctgaattctgtccaacccagtggtgctcatattagcaggggcagcagcctggtctgtcctgcctggaactcaactgccattgttggtggccataaggagggctgcatcccctgcgtttaggtgcctccccagtcggtctccctgatgctgagtgagagcctcaggatcttggcttgggaccctcgtagccacccacatacatcctgaggccaatttgttgcaatgctgccctgttttgacctcttgagatttgggtagcctattttgccattgaattagcttatttgttttgggtaagttattttgccattgacttagcttatttagccaatgggaagacatataagatgacctagccctggcttttcaaaccaaaattaagggccgtggagtttgggaaaggtgcatacctcatttggaagctgggctggttggaccaggaggctgcgtgcagtgcgcttgtcaggccgatccttctagaggagagcctgctgtaatctcttcggttcatgctgttccaaccagctttaatcatcaaaaccagtgctaatcatcaaaacttgaataatatacagactgcgaaaggaacatatttcttgccgaagcctcgatttgccaaagggaagcacctaagcttccccatctacccatctatggcaacatgttgtaaaaataagaagcacctggatggcttcatatgatgtggggaaactgcctttttctacgatgattctcagttttaaaatttcctctctttcccccaagaggagaaaaatgattttcatggaaagcgtgtttcagggaagtcgcttttttttctctgtataaggtcaccacctcacttgtgaccttgagggaggcttcctccctggccccaggtgtctgacaaggtctgctctagtggcccctgggtagaggtctggcagtgcgggggaaggtaggggaggatttgtgctctgagacctggaaggtacctgtgactgggacagagggaaggtcgcaggcagccgtggagaacctcgtcaggagagcagctcctgctgctgccttgatgggataaaggcacacaaacggccctcctgtggcaggggctccagccccagttctagatgagggctgtagtgatggcccctggcccttgcccctccccacaggctctccctcacatcactgagtgagcagggcttttcagagctacggccctgctcaggttttaaaatttaaagcttgattctgcagataccacaataatgcgtttttgttaaggaggacctctgggggaggcagcaggggtggggtggtcactcactgactgtgaagtcacaatttgacagctgtaactgtctgctgtttttattcctggtataccttcccgaatgcctggtctccggaaacattttttgatagctcaaatagacacctgggccaagtatagtctccttggtcccaggaaaatgggaggcagttgcccatcaggcccttattcctgtgctgggtgtgaccagtgctgagatggggttgggtggaggatgtgagacactgctgcctgggaactgagcatgcggcagtgaggagggtggggcttggctgtcaggccagcacagtggcaattaaaacgtgctttcaactcaacaaacaaacacctccattaaaaaatgggcaaaggacttgaatagacacctctccagagaaggtataccaatggccaataaggacacaaaaagatgctccacatcactaatcattggggaaatggaagtcaaaaccacaataagataccacttcacgtccattaacgtgactataaacaacaacagaaaataacaagtgttggtgaggatgtggagaaactgcaacccttatgcactgctcatgaaaatgcaaattgtgcaaccgctatggaaaacattatggccattcttcaaaaaattaaacatagaattatcatctgatccagcaattctgcttctgagcctatacccaaaaaaagtgaaagctgggacccaaacagatgttcatacactagtgttgctcatagcaaccacattcacaatagccaaaaggtagaagcaacccaagtgtccgtcagtgatgaatgaataaacaaaatacactagatacatacaatggaagatgattcagccttaaaaaggaaggaacttttgacacacgctatagcgtggatgaaccttgaagacgttatactaagtgaaataagccagtcacgaaaggaccattactggaggattccacttatatgaggtacctagagtagtatggattggattcacagacagaggtagaatggtagttgccaggggatgtggggagagagttatcgtttaatgcgcaaagagtttcagtttaagaaaatgaaatgctctggagatagatggtggagaaggttgcaaaacaatatgcatgtaggttttgcagatgctgctgccgctgctgggatccccatactgtcagccgtggtcaaccctgccgtgttcttcgacatcgctgtcgatagtgagcccttgggccatgtctctttctagctgttttcagagaaggttccaaagacagcagaaaactttcatgctctgaactttcatgctttcatggagagaacggatttggttataagggttcctgctttcacagaaatattccagggttttatgtgtcagggtggtgacttcacataccataatgacactggtggcaagtccatctacagggagaaatttgatgatgagaacttcatcctaaagcatacaggccctggcatcttgtctatggcaaatgctggacccaacatgaatggctcccagtttttcatctgcactgccaagactgagtggttggatggcaagcatgtagtatttggcaaggtgaaagaaggcatgaagattatggaggccatggagcgctttgggtccaggagtggcaagactagcaagaagatcaccattgctgactgtggacaactccaataaattagacttgtgttttatcttcaccactcagccattcctttatagttcaggagagcatgcctgctccccatttgctcacagtatcctagaatctttgtgctgtcactgcatttccctttgggttccatgttttccttgttcccttccatgcctagctggattgcagagttaaatttatgattatgaaataaaaactaaatagcaaaatagtgtgcatgcacttaatgccactgaactgtacatttaaaaatgattaaaatggtaaatgttatggcatgtatgtttcatcacaataaaaaaatagatttccaaacatattccaaagtgattctcctagtaaattctttttaaaattcacctaggaaaaaaatgtgttttacaatttagcaactcttctagggcacttgccgtgttacccgctctgtgctgagcattgcattgcgtttatttattattattttatttgaggtgtgatcgttgagaagcaatacaatgaaatctacagcctcaagtgttcagttcactgagtttcaataattgtgaacctgtgtaactgcatgatgaacctgtgtaactttcatcaccccagaaagttccctcctgccctcttctggtcaacccccatcttctttccaaccactttctgatgtcagtcatcatgggtttatgcctgttctcgatgttcttgtagacagaaactcacagtgtgcactcttgtgtgccctgctggtcttgctcagcctgccgtctgctgttgacctgtgctgatgcgtgtccctggagttaactctactgctaactagtactccatcccatacagtttgtgcatccattctcctgtgggtggacattgagatggcactgtggtttggagaccgctgacagtgagtgaagatgtcagctgaccactggggagtgtcccggcagagtgagcttgccacacttcaagttttcggtgctgggggttttgcttttttggtgactcagcactagggacaggaagtggacagatggccttaacaggttgacgtccctgagctgtgatagctgccacacccttccccagctccgacggccacctgcagatgtgatcagatacccaagggggctagggtggaggtggaggagtagagcggcccctgccccaggcagggtttgggtggcctgtccccagcttggcctcttcctttctggattgaagccttgaggctggttgagatgctctttagccacattaaagccattagtctgggactgaagcaccacagcttttccatctttccagtgacttggctctctctgctgtgacccattcttgggtgagtttgtagcctctgagtccaacactgaggtcagtgtctcctcatttccccaatgctgggcagtatcttatctcatgacatggtgaggcctaatgcagagccatgcagctgggcaccgtggctcacacctgtaatcctagcactttgggaggccaaggtgggagcgttgcttgaaaccaggagttaataaaggtcaacttgggaaatataatagtgagaccccatctctacaaaaaaaaaaaatgttaaattagccagatgtagtggtacacgcctatagtcccagctacttgggaggcaggggcagaaggattaacctcctggttaagggtgcaatgagccaagattgcaccactgcgctccagcctgagtgctatagcaagatcttgtctctaagtggtatgggagggggaaagctacacctttgttgcaaatagatctgggctcaaacactagctggctacctggacatgatgcaatcataggcaagttaatctcttggagcgtagctacctcatatgatagcatcaagaatacctttgttgtcccatgtctgccttcataggcctgttggaggtgggagggtaattcctgccttccagtaacatggacaaatttatccgtgtgaaagccagtttcacctgaggtcagtttcctctgctgccccgtttctgggcagtacctcatgtcatgacatagataatgcaagttgagagtgtgtgggtgacaacttcaactgttgctctacagtagagacctgtggagacaggacagactgatcagggtgggctgtggtcactggggaacctcatgaagcagacagaatttgggggccctccaagagaaaaagtatttatgccggtttccctctctccattcagaaaccgtactctatacacccccggtccccaccctaagtccaccaggtcactgacagctaacaattgaccttcacctgggagaggtaagcttgcaaggcccagcttggacatgcacctgtgatttctaaaggacttcttctgaattcatctctgaatgaggttggcggcactgctatggtgtctgagcctatacaggagccgagggctatgtagtcatcagagcctcagtttagaggctcacatgacagagacatggagtgtggagcccatctcagcaagtcagggcctgacgcgttatgcccgctcacatgtaggcacaggagacctgggacagaggaagcgatctgctcctgcctgaagtagtgggaggggcaggaaggtgcattgctgagcagagggactatctgctggtccaaggagcctctgtccggctggactgaggctaccctcagcttccatctctcctcttcattctctagaaggctctgccaggttcagatcctgcctgtcctttgcagctttgtagggagcagtccccacatctctgaggattgcctgatgcaagttctcgaggtaactgcttcagggctgcgtgggagtccccagctgacttgaccatgtgctcctgtggaaaatgatcacctcaccttttatttatattctgttgttgattttcctctaaggatctaggccagtgctgggcacattttgcactttcaacagtcgaggggcagaaaaagagaattaccatacctgaggcttgccagtcaggggcagagccagaactggaatcccagcagcccagacgtgggaagagcatcgaggaccggcaggaggaggggatgggagggccgtctgggtgaggggtcatctaagagcccagtgctgtttcacactgtcccgggtggaaaatgcaaaccctgtggattttcaccctctcagtgttgactattgtcctatggaaataagggtgatttcctaaaatgtgtggctcaataaaggattccttcaccggggtgtgaaatgactgtgcatctgaatctgagccagaaaagataaactttgctccattttcccacacaccggattagaatctttccaggacactaacctagtgtgtgcttatctaggtccttgggcctaggggcccctggtgaaagcccaggccatgcaatccgagtcccagcgcccccatccttccccctctctcccgtgggtttgtatctccctggcatcccccagcagactgctctgcccagctgtgaactgaacagcctggcttgtcttggggcagaacctgtcctcacaggtgtgtttgggcactgcaggagggttggggaaaagtggtgtaaataaccctccttgcctttctgctgatgagaaaaccatgggaaaaatataaaacatttctatggatattgagaacaaagtttcttcagtgatttcactgtaagtttggttatttgagagaatagtttttaattaataaggaaacttaattaatacatgtgtgtccctgatttcttatatatgtgtgtgtatatatatgtacatatacatatgtatccctgatttctttaaatctatgtatgtgtatatatcttatatatcatatataatcttatatgtgtatgtatatatatcttatatgtatatatacatatagttttcactgtagacgtactatactatatatatagtgtacactataatgtcaagtatatgaaaacaaagaacatagataaaaaggctgaaaatgtgccataatattaacagtggtcatctttctaccataacattttctggtttttaaaataataagcgtatttttcatattgggaaagataaaaatttacctaacaaggcaaaagaattaactatcataggaaagttaattttgccatgcccgtccccatcccatagtgagcagtatgtgtttacgtccatgctgacattaagactgatgaaaacagaaaaaggacaggccgccatgtagaagaaatttttaaactaccagtttttaaaatgggaaaggaaccaaatggttttgtataatcccatataaaaatgtccctcataatgaatctcagactcaccttaaaggaataattctcaggattctcttccatgctggggctccagtaagagtcaagatttggggctttcttaaagcaggcttcaaaccttaaaagcataccttattgaatgccagtgccagcattctcaaataactgtgcccccaagtggtcacatgtacctgtaaattacatgcagcaaaaaggtgcaattaaccaggtcctggactgcagagtttgcaatttattaataataatgatgatgaaaacaataatacatccaaaagagaaaagaaaggggaagatgaaacccaaagagagagagagagagtgtgtgtgtgtgtgtgtgtgtgtgtgtgtgtgtgtgtgcaggcgcaaaagacagggaagaattttctcagtgtttatttttgccatgcctctcccagaaaaagagcgtgtgtgcgtgtgtgtgcatatgtgtttgcatttgaggagggaggcctggccagaagaggtggggggtagctgtgggcagagccctcccaagaattctggagactttgcatcctttctcaggagcaatcctcgatgcctttgactgcctacttctctgcagcggtggttccatgatagtctccttggcagcctgccagaggctgtaagtgtacagagaattgtgttttaatagaaggctttacctctgatacagatttaaaatgaggaagaaactttctgttcctcagccagaacgaaatgcgttttgcttcctgtgaaatgctggtgattacaagctcatcttacataattttattattttcaattgctgcccgtcaatctcaggtgatggttccctgggagcagaaaaagaggcagattctgggcgatgactattaaaaaaaaaatcactcagtcattagcaaatcgtacaaaaatttagaaaggagaataattatctttgtgatgatgctgtttaagataatcagaacttgcattgctaagttagacacgccgaagtgaattgaggactgtttaatggcctcttagaaaatgtatttttgctttaacaaagcattgatgtttgagatttaaaaaaaagaaatcctttaaatctcgtgaaggaattctctggaataaccacattttcagaaatccgtgacatgatcgaggtggtccactgtcacgcccacaagagggcattttctcatcaactactgtaaaaacgatttgttttctaaagggaagctgagaggcctgggggaaggagagtgttctgcagagcaggaagtggagagctgcttgcaattgagttgtatgtatgcttccacttaatacgtcctgccgagcctgtaagccaacacttccggccaggaatctgccctctgtgtttacctactctctttttatgtcttattcccagaatgactggggaccaaaggaatcctttgcaggagttttctccagacagacagttccacatgctagtatattgtcgaccccatccataacttccatgaaacttgaatctcatattttaagacaccttctctaggtccaagttctttcctttatgtatgttacacatatttgttgagtacctactgtgtgtcagcttgagccagactcagatcctgtcctcgtggaacacacatcctccacaggaagacttggcataaaaaaggagaacaaatactggagtatgatttagataattataaatgttataaggaaaaataactgggataaggaaaggtagctattttaattggataattaggcatacttctctcatgcataacaaatattctaattttgttcaatccataccaatattgtttggattataaaggtaatacctttttttcaactccattttttctaaaaaagttagttatattgtttattattttacggaccatgaaacatgatggaaaccggggaattgagatgtggccagttgttagtttgtaaaatgacatttaaaaattaccatctactcatcacctcatcatttgacaaaacaatgcatgttttaacaccaaaaagtaggaaagatgtaatccctgaatagagggcagttgaatacgtttagtgttttggaaaatttgctgcattatctgaggttttctccttttccatggcctatgagaacttcatcagggactggttctggtcaggggctggcatccagttccacagatcctgctgatgacattgtccatgccttccccaaccatgaggaccaacaatgttggcaccagttctgcaagctcagctcccaaccacaacacacaagactcgagcaggagatggtttgctccccatcctaggggttctaggatacttggtaaggagctcagcccaagagctacaatgccgttgtgagagtttctgaagccaggagtcaaggctttactttgagcacatggttttggaggtcaagcagaatgggctgggcaaatccaggaaggcttcatgggggaaatgaattttgaacttggccttaaaggatgggtaggtgtaaggaagagggttgtaggattatagtgggtgatatacacatttttgaaagttaatgtggaacaggttttggtagtaaaaggcaacatccattgtgtaaaatgttcaggtataacaacaaagtaataatctctaataaatatattgtctaggctgagcgtggtggctcacgcctgtactcctaccactttgggaggccaaggcaggcggatcatttgaggtcagaagttcgataccagcctgaccaacatgatgaaaccccgtctctactaaaatacaaaaattaatcgggcatggtggcgggcacctgtgatctcagctactcgggaggctgaggcaggagaatcacttgaacccaggaggcagaggttgcagtgagccaagatcacaccactgcactccagcctgggcgacaaagcaagactccatctcaaaaaaaaaaaaaaaagaaaagaaaacacacatattatctagagatgattgttaatattttatcatattgtcctccagtcttttgctttgcattttcacattagttgggaccatgttgcacatgaaattttgcatcttgcttttttactttagtatacaacacacattgcctcatgtaattgaaaattactcttaaacatcacttccggatggcttcatttatcccatcctgcctgcatgccattcccatcagatgtattttttttcctactgtaactctctggtggatagttctttttatatcattttggttcacaatttcggtatcacacacatctgccaaggtccagctctgagggtaatattgagcctgtcacaatatccaccctggtctctatctgtgcatgtcaagtgaagataatataccaacctcatggggtagatatgagacttatgtgagatcatgtttgcatagagttctagaaatagaattaccaaggtttgatctctttaaaattatgtaacttttcaattataaaagtaatgttctttatggaaaattttaacaaaagaaaaaccatgcaaatttcatcacccagagataaaaaaacaattaacattttagaatctattatttgtcactttgtagcagaattgggatcgtactatatatatcattttctttcctgctttttttcctcttaaccttgcattgcttctcccttgtcattattcatttggaaacaatcttaaaagaccatgtttcattatattctgttatattaatgtgtcttatttaactgtttcctttttgccatttagataattcagtaatttgctactataaataacgttgcaatgaaatactgatgaacaaatctgtggacattttgggttacttctttaggattaattcctggaactgtatttaccaagtcagaggtggagcagcatgtgaatactcactttaccctattctatcctattataatttttttttaatcttagtctgttaggtaggtgagtaatggtatctcgtggtctcggttgcgtttccttgattaccagtgggttggagcatttgtttctgtgtattgacgtacctgtcctctgtttgtccttctatttatattcatcttttttcttattgatttttaagagctctttatgcataagaggatattaaccttttggtataatgttggaaatattttttcagtttgtcatttgaattctaaattcatttatggtttctcggttgtatagatgcctttactttgcttatacgaatcatcaacgtttttgttgttcagtgtttcctcttgtttttaggcttagaaagcccttccccatcctggctttggatatctgcgcagttgcattttcttctaattgttttgcaattcattttgcaaattcaactttttatcaggttttctcattttgctataaaatatgatcggaatttaactttttcttaatagtcatttaattcttccatttgcgtttagtgaatgatctttctgtcctccctgatttgaaatgctacctctcatacattaaattctttgttgggttttttgttgttgttgttgttgttgttttgagacggagtttcttgtcatccaggctggagtgcattggtgcgatcttgactcactgcaactccacctcccggttcaagtgattctcctgcctcggcctcctgataacattaaattcttgtatagactagagggtgtttccaggctgtttattctgtttcattcaaacttagttctataccacactgtttcaaatgctgaagttttcattttgtgttttaaaatctggtagtacaaatcatcttcattattattatttcccaaaatatttttggctactatgtctgacatatcttgtatagcccagaggaaatttagaagcatttcacgctaaaaaaaaaaaaaaaaaaaaaaaaaaaaaaaaaaaaaattgagttttttttttacatgatagccatatgaattcgatgagatccgtaaattgatttataaagaattgacatttggactacattattgagtcttctcattcaggaatgtgctattccatttactcttgctctctctgtgtttatttgagtttacttccatatctctctgtaaacatttgtggctttcttcatgtgagctctgtgctgctcttagaaacttcattcctatatgttacatatacatagagtgagatcgttctgtcccaacatatttgctaatgagttattactggcaaataaaaaagctgttaatgtttgtacattgattttgtatcttgctgggttactgaactttctgatggatggaactctttttaaggccttcaaacatgttgaatattgtactaaaagattgtctgtatacccagggatgtctgggagagcttgtattatcatttttaagaagcttttctaatttgaaggaaaacggcctctcgttgtgtcttcacattgaagtttctttgtgactctaatcccgagtcctggtagcatcatgtatttggggcatacggtgttcgtgtgcaataatccctccttgtaggcctcccctgaagcaacagacaaccatgacagctctgatgagcacctttcagataggagtttggggttcacagctctgccttgttggggggtgtgtgaggggctaatcataaagaataatttgggagctagttctggacacacgttcccagactgattgggtagagcctgttgttgttgagcttgggtttaaattcattcacagccagacaaacgtgagtatgaagaaccagtcagacatcactttccccattggtgatccctgaaggactttccattcgcagcacaaagataaccccttgaagagagcaaagaagaagagaaaggctgaccagaaatatgaccgtaatatctaggcacttcactctccgcagctgtactgagctcacattatattgtcatcttctccagattaaggccttctatcagttatgggaaaggcaaggatttctcctaccctgattcttcctagcatatggctggaggtgggggcggaatctccccacatccccacacagacggcttgtgaatgttctgatggtgtgcgtttcctccgttggacgaacaactcatcttttactctttgctttttatgccagtttgggaaggttgtttttctcccacttgaaaatcttcctcggaaggaatatgttgccatcagcaattcctctgtgttgtaactatctcctatgaagccagactgtaaggcagtgcgtcttccctcaatagaacccaagcccattcttcatggttcagcaaatctctgagtgccttctgcgtgccaggcactgtgcttggtgttggaactcgacagggagcaaaaccatgcctggttctttccctcaaggagtttacagtctagtgggggagacagatgtttatcagatagtgcaaaaggcaataaacactatgaaggaagatggtcagtgccattacagggagctccgcctcttcttggattcagggagtagggggaactgatctgagatttaaagaaatgataagcttagcatttaaagggagggtgagctggggaaggagcagggatgatgcattccaggcagaggagatacatgtgcaggagagagtatggtgccttcaaggagatgcgaaaaggtcagagaaactggcattaagaaaccagaggggagcatggcacaggcggagagtggagaattaggagggagaggccatgcagggtttgtctagccgcataagtatgctgtgtctttattgcaagagcactgactggctgactgtttttaagcaagggaatggcattctgcaaagacagccctggctaccatgtggtaagccactgtgaaacactaaggaagaagaaatggggtacagttaggagaggactgcgggagtccaggagagagttgaggggatggtgcatgtggagacaggtaaatgggcaggctggggtggggggttcgagggtgggaagtaaaggagagggatgtctcaaggtgacccctagattactggatggatgtggtgctgtgctgggcactgggaacagtggaaggggtcaggtatattggagaaaactgagctttgtttaggactgggtgtgaggactcctgaggcatggcagtggtggcagataggcagttatgtgtgtgggtctggctttcactcacaggagacatcagggccagagacagaaatttcgaggaatcatccacataagattctgagagaagaatcttagtagtaagggtcaagctgttggtccgcagtcctcttcagacctcttgctgctgctgctgcttgtgacgacactctgacttccaaagacagtacttcccaggtgtggaggagggcattgcatttcctgtgtatcctccaccatgtgctggctgagtcaagaatggaggtaataaaagagacgtaaacacgggaaaccacacgtctaaagcgtcccatctgtaaactcttgcttactctccagactcacaggccccatccttcagagtgagtctcttgagtacagagatggaacttggaagtctctcctgctccctccctcctctgaccagagccttcccttcctcccccagcccctcatttctgaacaatgagccttcaaataccttgccccttaaattacgtgcttaaatttaagatcatttatctaattattcatgtaataaatgtttattaagcacctgctctgtgccaggcacagtggcatggataaagatggtggaggcacaagatggggttataatgtcgatatgacaaatgttgaaatatagggatgtccaaatctcctgtgaggccaggtgagggaggggcagttcaagggagtgagagaaggcctagggatttgtgacatgtagcaaaggttgaggacagggtagtgagaacatttggggcagaataaacagatgtgtcagaggaagtgttgtgggaatgtgaagtagttcccatgcctggagtatattgggtatgtatgttgcaaaaattgtgtgtgtgtgtgtgtgtgtgtgtgtgtgtgtgtgtgtgtgtgtggtcaaggtaggatggaagggcgaggtaatgggtcatgggggtagagagagggagatgggttatgacctctaagctgccaaggtaggtaacatccaaataaggcaggacctcgagaagagagttgtgaggtcggccagatttccttctgttgtgtgtgtgccgcaagagttttctcagcctcatccattcccgctgtcgggagatgagacaaaaatatccttattcttcttgcattgggaaatgcaagcttgcactggaatcttaacaggtactgctggttctgccttctccacttcccagatgtgggcatggcagctcccagcatcagtagcattgaaagattggttctgagggtctcctcgggctcttttggcagagtggagataagtttctaatctgagtcacttagggttctttgcatgggcccagtctaataactaaaagctctctggaggagccagaattttcgtcatggatgttttctgactcatgttgtcattggaatgacttttagttcctttgggcatgtctgacttctacgcttcttaggaaatgtagcaaaggttgagaaaagggtggtgagagcatttggggcagaagaaacagatgtgtcagaggaagtgttgtgggaatgtgaggtggtttccatgcttggagtatgtcgggtatgtatgttgcaaaaatgtgtgtgcgtgaagggggggggggggcggtgcggtagaggtaggatggaagggccatctctgacctgagaccactgggctggacagttccagggttggggtgctgtgggcttgtcgagtggccagatcacgcctaatatctgctcagggtgtgtcaatggttgaggaatttcagagaactaatacaaacaagttcatgccattgctctgaattcaggccccagcagtgtttatgattgcttgaccaagccctcaccagctctttctggaatactcagtccagtgagaagtgggcactgggggacagagaaggaagaggagagaatcatgagccatgctggatatgcaggtgggctgcagggctcaaacttgaaccagtgcatctaaatgggccaatggtgccttgtggactgaatgttctccaaggcttaggaggggtgggaggaccccaggaccactaccttgagggaaggagagagcctgggaccgctggagctggggacagagctgtgagaaccagagggagtggagattactgtggacaagaagcatcttggaaggtctttcaagcacctgggcctggacaaaaaagttccacaggggtcaaaggcaacactgcggaaatcctctgacagactgggtgtagctggccagggtggtccacgggatgctatgaggaccacttgtctcctccgcaagaagctcgcaaaatgggaaatggcaggtgtcggccttggagggagatggctggttcagcagcgcaggcatccttctccctctgcttctgtttgactgcttccaagtcacctttcatgttgtaaaccactgcttgtcactttgccaaattcctatgctcttacttaagtgtgattcaagcactagatgtttttgacatttgaagattacttggttctttgggcaattttctcgtttgccttcaaaaaaatgcctgcagttctctatttcatccggtggaaaggtgaggcccaggatgcatgtaatgaactgatggcactgtgaggcactgggcccggtgaactcgcagggtgtagctgagatacaaggtgttttctactaaaaggatcaaggcagctcctcgacctcacattggggatcatttgtactgaagataattcttcagcggagtcgtgctggcactgagttagccagatgagctgatctccatgctgaagccaaccatggggccagccatttccatcctgactgcccacatgctgtgtgatccattttctttgtggcagagggctggtcactgcagacccatggacacgggtgtcaccatatggtcactccagacatggacgtgggtttcataatatcatcctttctactccactgagccaggactgccatcaccgggcagaggttaattgaaaattcatgtaactatccgctcatttattaagacccacctccttttcttccctctcccaatgcctctctaatgccaaaatgagtctccacccctggggagagacgggagaaagaacaacctgctccccaccttgaaagaaaccattgacttcatggaaaaaaccacagattcatggccctgcagtgtttgtcttggaatgtttgttcattttcccatttgttccctttgtaagctgtgcatctgtccccaccaagcccggtgctctgaaggtggcatcgatggccctgagtttgtccctagctcccgcccttcctttgtaatgtgtcccttcttcccccacgggtgcggtgggaggcccgtgcaccctgctgtggggtaaggtggcatcaggcacagagagagtgacccggggttgtctttggtcactcacaaggtaatttcacttggcaaatgattggaaaagaggctgctgttctcacagacgtctgtgaaccccatgcctgagcttcttagccctcctagctgtgctgttccccagatggagtccattccattaaaggactggaaaacagaactcttgaagacaggataaaggattagggataatttcatttcagaagaaagaggctgaggagggacttaattgtctttgaaggatcctcctgtggaggacagagatgagttgttctccatctcactgagcgagaggagacaaagtggatctcaaatgaatgtgcaaagcttcctgtgagctggggccggccccctgcagggaaggttcagggagactgggcagacagagtgggtggcactaggggctgtgggggccgcgcagacggatgtgtttgtgcggcggggtgggagggatgctgtgggagaaagagatgtctccatcccgtctcagaaaggaaattgttaaaagcaagaaattaacagacagtgagtaggagagacccccagtggcaggggaagcaggtgtggagtgggttcaggctggctgggtcctgcagactgggtggaaagcatgtcagctgaagtacagaggtcacacagggagagcaggaggggcccatggggctggagagctcaatttgagcctctttcccccaaaggtatggggacccactggagatccttcagccagggagtgacccatgatggggcttctcattctggtgtgttatcccttgacaatgggggaagccacatagcatagccccaaatgcccgtctacagatccttgccggtctcagactggtctgcagcaaacagaggaaaatactgacaccatgcagtgagtttttcatagaactaaatgcattgcatttaaagtgctgtccttattctgagactgtgttctatcatccaagattctttgtagcaagcaacagaaaccaatcctgggtaattgaaacagaaaaggaatttattaaaaggatattagtcagcccagagtctccagggtagttggagaaccaggctcagaggccacatggccaggaatgacaacagtcatacccagatcaggccccacaaggccccacagctgccctgctggtcagacctccagttggtccagaacagcaccaccaagcttccaaaagtgggtgctgcaaatgctgcagttctgcgctctccccactcctatgggtcaccagtttctgatataaagtgtgtgtcggtgcgtcctgttggtggagcaagggaggtaagtgaatttgccattttcagcttctataatgcaagacgggcttagcttccacagcaaggcaggggcttagctgtgtcttagcttcctagacacaaggcaggggctcaggtgctgagaacctgcccaggaaggaaaggtgtttcttctctgtctctttgagtgtctgtgcatgtgtgaattttaaaaacgttctttcttttgtgaagcgaaggtgattaggttgtttgatgtttaaagcattattgttacttggcagaatatgaagttggaaagctattatttgttcccacaagttttggaggtttagtagtccatgaaatccaaaagactaggactttagtgccagacaggctgggcctcaatcccagagctgccccttactaatcaagtagctttgcatgaaggtttctgaggtcctgttttgttgttgttgttttttaaatccccttagtctgtttatgtatccttagatctaaaggtagtctttttatttttttttttgacatagactctcactctgttgcccaggctaaaatgcagtggcacgatcacagctcactgcagccttaacctcctgggctcaggcgatcctcacaccttagcctcctgtatagctgggaccacaggtgtgcaccaccacaccctgtatatattttttaatttttttgtaaaagatagtaatactcactgctcagagttgcagtgagcagtgaataagaagacatgggtgaagtgtgtaatcaatagctgataagaaattggtgacactattgggttgaggggtcgacattgatcaaaacaactttctagaggcagatcctaaatcatgcagagtggcttagaatctgttcttgtgcctgctggagttacaccttcatggcaacaagcacctgagggcacagtgataacatcccgagagcctggggagtcttgtgtatttcttctctgctaacacttgtatgctggaaagaagctgttgtattctgaaacactgatgcatcccaagttcagaagccctgacctcacagagctccacttctagaaaaacacctagggtaatccaagccccgccctctgatgggactggatgtcttgcagctgcggtttggtgggcattttccctctttgtctccctccctcctctctcagaatggacaggacaggctgtgttgtcctctgcaggtccatgcctcagtttcttcatctagcaaaaggcaagtgatacaccaaggtcaccagggcagtgagttggtggcagaaccgggactcaagtccagggtctcttcatgcaaatgtaagagatgctatgtggtggtgcagtcttgggctggagggactcagcccttttttgcctgtgaggttcacatcaccctgtcttttgagctgttctcatctctctgtcaatagatccattgtctatgatttactgaaactcttcctggagaagctgcattttatccattgctgcctatcgggtaaagagggtgtctagtgtgttgccagctaaataaacatggtggccttcctggccacgttccctttttctgcccctcctggggctccatctttgttctcactgtacacattctctcttcagtattgttatgggctccctaaaacaatggttcccaaatccgtatcttcagtactgaccccactgctgactgtgagacccataacaccagctcactaagggccatctcccctggatactccacaggcacctccatttgagcccttctgaagctgatctcaagcctcttttcccaaccccagcccaaatctcttcctccacctgggttcctatctcatggccctgacagaagcctgggagccttcctgaatactcttccttccacccccaacatagagctgttccccggggccatcagccttcttctcttcattgcctctgtcctctctctccattgccaccaagacccctgcttggttcaggctccatcctctcttaagggatttgacagcaaccttttaactcatctcctggcctctgagcttttccctgcccattcattctccatccagagccagggcaccaattctatcctgacagccttctgctagagccatggcttagagatctcatttggggatacacgtttgttgtgtggccatcatgtgtggctgcatggagtgaccgaagtgaatcatctgcctgcaagcgtttacactcaggtgagcacaattcacatactccttggcttagcacatgtcaccaaacttacatacgtcgaacctcgagctttaggtaccttgtcttgatcctggcaacagtgccatgcagtacgcactgcgcgatccccactttcctgatggagacactgaagcagacggaaatgaagtcgtttgtccaggtgaacagagcaagtcagtcgtggatggaggctctgtacccaggcagccttgaccctgggattttcatttttatcactgcattgtctctcctccagcctcacctttctctcccctccagcctcacttttctctgctcttttcctgtcatagaccctttagagctctgctgaagtgcttgcagttctcccaacaccgtgggcttgttcagcctggatttttagccttgagtttcttctccctagaacctttactgccaccacgacccccaccctctactgaggctgtgtccagtgtggtcagagagaccatctgggtctctttctttttggtgccctgtagcataacatcgtctcctgtcatattctgtccatcgccctggagtagtttgttcatctttcccctcagctagattgtgatttccttgagggcagggtctgtcttgctcatttctgtccccgaagcccagcacagtccctggcatattgtagacacgctgtaagtgtttgttgaaagagtgaatgaatccagacacaccttccactgtggggtcctgccctctcactgcggcagtgggctttccaaactgaagaggccttgtgcttccacctgccctcctgcctgactccccaccccatcctacctggaccccgccatggagccagggcctgatccttggtctttgttgctttgtcagcccttggtgatggagtgggcatgggcactgtaaggaaccccccttgggagggtgtcccaaggctggcaatccctagctgggtctgggggcagatccttcctgactcccacccccgtccaagcaatttgtggcctatgtaggctccacataggcatctcggagggacctgcagacccagtgctttggttttgaaatgttaggcttcagcatgatttagtgccctggcatttctgagctagtttacagtaatcaggcatttgttaatgctcactttctcctccacggactgttgctgacacaggaattttctttgttgattagatttagccctgtgctaaacagtaaccgggggagggtagtaagggaagcctggacgccagcagtgatggtaaccgggggcccagggatgctggggccacagcttatgaactttgttagtgacttaacccctctgagtctcagctgtttcatctgtgagtcagggataaccttacccaatacgctggggttactgtgaggattaaaaaagaaagactacagagcattgtgtttgactcacagcatgcacttcgtcaatcctgatccccccttccctgccccttagtgcccatgttaggcttgacttattggcacatgagttccacaaggtgccagatggcactttccatggtaaaggaatctataggtaaagaacaggctttgtctttctcctagtactgttaggattcattactgcctccaactcctgccccgtcacacgccccattggtgtcttttagagtctggagttgcagaccacagatactagtaaattgtcctactgactaaattaaaacaggccaagtcagaaaactcggcttccagattgccagaccagtatgatttttccaaaaagaagagcttccataaggtcacatttgtgacttataattttgaactctgcagacactggccccgccctctggccagaactgtcccgctcccctgccttctgtttctctccctctcttgagtcatttctgctacctctgagccagtgaaggaggccagataaaggctcctggtctgtcctggcgctccccaggctggagggtcccacctggggagggcacagccatcacaggagctgcagggccgtctgtggcccgcgctgtcggtgggagcccacagccggggtgactgcactcacgtacacatgtgactttcctccttgtccctgtctcgctaggcttgactcatctctttaatcactgtggacttggatgctctgttatttccagggcatcttctcaatttcattctgaaagtatgtcctcgctctattcagaatagatttttaattgccctttccctgaaaaatgtcgagcggaatgagtcctcaggataacagtggccttaaccaggagtctggcattgggctcagtgctgaggcccgtgtcgcagtggggctggggtctgagggctcccgtgggctgcgctttggggtgcggctggtctctcagcctggccttttccccactcaggcgattctgttcctggctcataggtcatttgttgagaggaagggacttggggccagtcattactccaggattaggctgcctgtcccagctcggctgttgactggctggctgacttcaccactcccttctccccactgagccacagaggccttgtcatgtaacacatcacaaaggttagataagggcgtccagtgctttcactcgtggaatgcctgcagaataacatggtttccccacacacggagacacaggctgcttgtgtggccggcacggggggtcctacgtcagcatgtggtgacccttggcctcgcccaccatcagatcactgtacctgtgtcccctcctgttccctcctgcccagcgaccctcacggactccgcatcgtctatccaataagaacaatccctcagccatttcagagctgtctacagctggaactcgcccaccttgtggccgtccctcgaagccctgtttcctctccttccttgctgcgtccacaccgatcccgtcactgcttcctcctgcctgaaattctcactgcgtgcagcccgttgagctaaagggtcagagactcacttaagctatgtcaaggaatggggcttgttttacgggaggcggaatcccacaggaacacaggcccgctggctcccgagaccgggctgtctggagtcctccatgcgtcttcatctcagggccctgctcacaaagcgactgctgccctctgagcagattctgccgcacctttcttagttttcttcctgatgtcaactgatagatcgtgtgtattttctggcaagaaattccaaaggcagagagtccagtgagcttagctaactgcccctgccccacctgccagagctcctggtgccagggtgtctgcagagtgcctgctggaccttgtgctggccgcctttgggtctggggccatctctgctcccagccacgtccacccttttccagaaatggcactgctgaggcccatctgtcagcggggcctctgggtggggcagtcactatgagtggcacatgtacgactcatctttccgccacccccccacccaaattatacccaaccttcaaagccgagcatcaatctcacaccctcccagaagccctggctgcctcctcctcctcctttatcagtcaacagagaccttagagacctggccaggcgccaggccaggggctttcattaacatcttcgcacactagtcctcacagcaaccttctgggaagtaggtatcattgtgtcccctccttacagagagggaagctgaggctcagaaaggcagggtgactcgctcagtagtgtagacaaggctccagcccaccctgtaattccactcaatgtttcttccacctgttccaggtcctttgagcccctgcagtcctcctggtctgtcacatgctagacaatggttggcacctgtcttgtggtgtctcccggcatggcctggattgtagtgatctgtggtctgtccattgctgaaggggtgtctgctcctgaagatcacatggtcagggcagagccggaggctgggctgggggcccagtagggcctccctacagagcacagggaagtggaggccgtctctgcctctcctctcctctcctcctcttttggggtggctgctcctggaggggagaagtgaaggatttctggtacaaagtcattctgcttgtcctgaatgtcaggaaggaaggtttagacaagattgtgtgtgtgtgtgtgtgtgtgtgtgtgtgtgtgtgtgtgtctgtagctgtgtgtgtctgtgtgtctgtgtcggcatgtctgctttgtgtgtctgagtgtgtgttcatgtgcctgtgtgtcttggtgtgtgaacctgtgtgtgtgtgttatatgttgtgtgtgtgactgtgtatgtgtgactgtgtctgttagtgtgtctctgtgttgtgtgtatgtgtgtgtgttcatgtgtgtgtgtgtgtctgtgtgcatatgtgttcatacatctgtgtgtgtgtccatttgtctgtgtgtatgtacatctctggctccaaagaccaggtctgtgtgtgaatgtgtatttctgtatgtatgtgtgtatctgtgtgtctgtgtttgtgtcagtttatctgcctctgtgtctgagtcagtgtgtctgcctttgtgtgtctgtgtgtgtcatatgttgtgtgtgtgttcatgtgtttgtctctgtcagtgtatctgtgtgtcatatgtcttatgtctgtgtgtgttcatgtgtttgtgtgtctctgtgtgtgtcagtgtgtctccctttgctgtctgtatgtttgtgtgagtgtgtcagtatgggtgggtctttgtgtgttgtgtgtgtctgtgtgagtgtgtgttctttgtgtatctgtgtatctatgtgtctctgtgtctgtatgccagtgtgtctatgtctgtgtgtgtagtgtgtttgtgtgtgtgttcatgtgtctgtgtctgtgtgtgcctatgtatctgtgtgtctctgtgcattttgtgtttccttatgtgtgtacatgtgccagtgggtctgtgtatgtctttgtgtgttgtgtttgtgtgtgtgtgtctgtgtgtgtctctgtattttcatatgcctatgtgtctgtgttgtgtgtgtgcctgtgtgtgttgtatgttcctgtgtgttgtgtgtctttttgtgtctgtgtgttgtgtgtccctgtgtgtctgcctctgtgtgttatgtgtgtctctgtgtgtgtccatgtgtctgtgtctctctgtgttgtgtgcctgtgtatgtgtccctgtctgtgtgtctgtgtctctgtgttgtgtgcctgtgtgtgtgtccctgtctgtgtctgtgttgtgtatgtgcctgtgtgtgtgtccgtgtgtctttgtctgtgttgtgtgtatgtctgggtgtcatgcggtccgcctgtgcaggtgagcgggcagtgcccgtgtgtgtctgtgtgtctgtgtctctgtgtgttgtgtgtgtgcctgtgtgtgtgttcgtgtgtctgtgcagtctgcatgtgcaggtgggtgggaagggctgtgctctgcactcctgatggatgccgctgtgctcctccaggaggccttgaattccccattcagtgctgagcctgcgagggatccagtcactcgcccacacctctgttggtgaaatgccagcaagccatttatgcccctattgcttagaaaatgcaaactcaagtcattcaacaaaagcagcccttgaatgggtcttgccgactggcccttcggggcctcagggcctggctgtcatggagccgtggcggggagccgcaggcctcagcgtggacagtggggttggcgggccccgcaggtggtccctgggaagttcctggtcacaggaagtgtttttcactcatccgcttactgttcttttttccctgcgaacagaaaagcctggatggttctcccggctgctgtccagggccgggctctgcagggcaattctggggccaccagaggcgtctgctgcgtggtcagcctggccgactgacctcccgggcctgacctccccaggccgtgcctcccaccccagggtcttctctcttcaccgaaggggtcccttccgccctgccctgagagctgccctgcgcgggctgtcccctgctttgtctgcatttgcattcaaatcctctctgagaacttcttaagcagtgtcacagtccgtgccttgtcctctcagattctcaaacgacttaaagcagagctctgggctggtgtttctctcaaagggaaatggcctctgtgatttctggagtgcgtcattcccctacgacttggcgggtctgttgctggccatggggtcagtcagagaggcctagcctcagcctggcgggcgggggtcctgtgggaacaccattccattctccatgggctcagggggtgcggtgtgggatctcgctggtcctcctgggcctcagctggtgccccggggcctccccttgagctccttctccatcctggagtgtcctagccaggtaaccccagcacaacgatgtgtccgcataggccaggctcctccaccacacatatgaaacagcagcagtgtgtctttctccctgaagacgagcagggagctttgtcacaggttgcacggctccaatctctccccgaccccattcaccatccttagtggcttcgctggagcatccgctctctctcccttcctgcccagctgtccacctgtcacacccagcacagccctgaggtgctgcctcttcacacgtggctccctgaaggacagtggggctcttgctccttttcttgtaataacagcaccatccaccactcctctctgaggaacggtgggtagaaccgatacttctagaacaagtgcttggggcttactgctatcaaaggtgggaaatgcatcagatttaaattacctattgtaaaagtcagccaataattccttacatagtttcccctaatatggaactttgggagcctctgagtgtgcacgtgtgcatgtgtgtgcgtgggcgggtgcatttgcgtgtgcatgtttcctgtgagagaatgcatggcgaacggaaatcagactcggtcaccatttggtttatctccttggttcactttgactgctctacactgttaaattgtttctattatttgtcatctatgctttcatttataaccaaagtggaccgctttggctataaaaagtgacaaagacaggaaacataaaaaacatttatgtggagccaccccaagttaatgaggagcctaagaatgataattctgcaaatttgcctcaaggttgtttttaccagatccataagttgtgatcatctatctgatccaagttcttatataggtcatctaaatgtctttagtacatcaaatgagaggaagaaagaagggtgtggggggcagataatacagagataatttaaccagcttgccttttattgattagaaaaaattattaccagcaatgtgttatttggaagaaggacttataaatctctctccgaatctcgctttatctcatcatttagataacatttgaacattactaaaacactgcagttgattttccttacgctcaaaaatgcacgaattctaacgatcgggtcacaaaagcagtttttatctatttttaaagctgatgcacataattaagtttcaattatgttttagatatgttggtccccaaaccaaaatgtcattttttatttgtcaacaaatcagtctttccttgcacaactaatttaaaggaaatgaaatgttgtgtataacgttaaatgggaaaatgttgaaatgtgtctttatatataatgaacgttattaaaaaatggtcttttaatgctcatttaatataatccttgaataatatactcatataaaatatttaactaaaaatcttttttaccataagccatgcaaaaatgataaaatgattttttttaattgtagggggtttgtgaaattatagattactgtgaaaggagttcattagtcaaaaacagaattggaaatgctgatctagagacacaaagcccagggatttcaggagggagctggagaaggggagagaagtgagggtggggaacaaccagtccccgcctgctaaggaatgtatggcttcctccttgggcgccagcaaatacctctctctccagggccggccagaccagggtcccatagcaaatgccaaaagctagccagaggtgagggcatttaggagtgttgcctttgagttcatccttcaaagaacgcaacgctgggcaggtagcagggtgagccccctgcctgcgtcctaccctggtgtggggatagggagtgagctggagacacagatgaaaggaagccagtgtccccccagactgcagccccgaaaggagcagcccttggctgatccccgctaagctgctttgccagcttgccttagattagactgggtgtactgggtgcaggcgacatcatttctgagaactggctgtcacatgacttggcagaacaatagcagccaggtggaattttgttccttgtaccatttgtgagcactggaaggaccacaggacaatagtgatccaggctgggtctctttcttcatagggcacaaatcaaagcccagagaggtgggaagaggccgcccagggcctcagggtggccaagagcatgctgtgtatacattctcccaggctcccatgtgtgcattcttccagtgttctgggacaagggtgtgtgccatttcaaagatactgatcacagaggatgactgcacccttcccatgcctggggagtgcctttgaggtggggagatggcctcagggtcatgggaaaggctcttgggagggacaactgggttctggaaggctgtgggaagcggggaggaggggatgagtagggcagagggttaacttacgcaacagcagaaaccattctactgtactcaggctctgcaggtgttttgtgaccctcctgcaggaacatttatttgtatctgttccagctggttgacctgccacaacccatcctcaaatgtatcaatccaaggtactattatttatggaatcattgactcatgagctccccagggctcccctgccaagtgacttcccggcggccactggtcacctccaggagcaggagctcctagcccaactgaggggaggcccctcttccatcagcttttcccctccagttctggttctttctgcccctcggggtctcccagtgcgcacctggtccgcctgctacaggaaggcctttcaggcatgtaaagaagcaaagacaccctccccgctgctgcaaataaacgcccaatctgcaagaatgtctcctgccctggctcacacatacttttcatgtacttttggcatctgagtcacgtctctaaatgggctgcagtttgtcaacatcccatggaaagtatggcccgagaatccagtgcagcactcagagccgtgactgggacagcaaagggccaggttgccagctctttctgccaaggtctcagtgcacagctggacccagcctcagctgacagctcttctggaagcttctgtgttctagcggggggtgatacagtctgccatgagggtgaagtacacatgacgcaccctgaaatctaacctctaacagagccacatgtgtcattcagaaaagaacattgctttcaaggccttttcttattctaaccagaaaagtgatagcactcttttatagagtgatgtggatttgagccattaaacgatttgcttactgatacccaggcctcttgatctggcatttcatatcccaggtgaccgctgcatggtgcctctgaatgtccctactctttttcccaaaacagtacctaacaggagctcaggtctcctgactccacaagaaggtgctggctaattgcacagccgaaaactgtgcaagagccagtttgaaagggggccacacgttgatcattctgggctgaatatttttgcggcgttctatatttacaccaaaatggaggtgaacttaacaatacggtgttaccacaggaaatgaatgaatctgtcaaaaatcactcttttactgaatgacttctttaacctgagctgccagaaaagtctctcacagtgggaagtcatgctttagatggtgtgtcctgatgaaaaattgatattggcggaaataacattttttaaaacttctaggtgttaacagtaactttgagttctctgtgaggctcagaggggtggcgtgttctgcgtggccacatccgtgtttattagtttatggccttctgctgtggcatttcatcatcacagcaaaattgcaacctttcagcgcctgcggacagtcacgttaaaatggctttgagggagagatggctcatgtggtcaggcgttttggtgtcacactcaattggctaaacatagtaattttggggtctattattgactaatttgggtaattcacctactgggaaatattttaagataaaaatgtaaaatcctgtcagtgtatgagcaaggtccttgatgtcagttttgtgacatatttttaaacactggaatctgttctgtggaatattctggcatgttgtagttaagtaaaacaatgttgggagcccatcagctgtctgtttgcccatcttcctgtgctcatggaggctcctatctgggtggttattttatacctgggcggctcccgtttaatagagaatgccattaacaagcgtgccagagtctgtctctgcctgcagccttgattagccatcagcatgcgtgaaaactcatttcttgattggtgtcgaaatatgtcacaccctgatggagcattgcaggctatcactgctaacggattaatgacagagcacctgccgcatggcctcatccacgacagctgccatccagagagaacagagtttggaccgtgtccgcagaaggccttggagtgttgacgtgggcaggtctaggaatctgcatgggcagaaatgtaggggagctgagtcactctgcggcaagtggctgtgtcttccgctgtccccctgcatgtgaggcttgggacctgaaggcccattttcccccagtgatgttgcgaggtaggtgtttagggtctggcatgggtataggatttcactagtttccctcaacttctatccctccttcctggcactccataatcactttactatgctttgtcttttgctgtgatgggtgtcccggtctcagctcctctcgcctacctgcaccaacaatgaccacacaactgttgtgtgcaggcaccattgccagagtgcatcatacaggtcgtcagtcccttggaggcaagaaaggtaccttgtttaccatcctaccccccgccacacacacacttaattatgttatatgattgatactcagggtttcagtggctgttgtgagtcaaattgtcatttgtggccgagtggtgaacaatgtccctcttctcgtgcccaaacctgagggctgaattggaacttggcataccctgaaaatttcaaaagattttacatgatgcaaggaatgatttggggccgttggctcccccaacagaaccagcaaagcctcccggtacttctttagtattttgctttgcaatgtcccagcctttccctttaagtctccttttcggacaatatatagaaagttctacaccacatctctcagcccaggttaagcgaggctggactctgggttctcatcctgattctgctgccagctcaaggtatagctttggttgggctagtgtcttctctctgggccttgactcccctgtgtgcacagcgagggagtttggaactcatggccaactctttgggtgaggatcgtgagcatccacctctccccaacaccagcctgcacttgggtacatatgttcacatacacccaggcacgcacgtgtgcatacatgctcagctgggccctgctctgtcactgatgagccagggcctctaagatctgttctctccatgtgagttgcttttgtgcagcccagggagccatggttgctggcgctggggccttggtgcccacatgtccctgggagaggttgcactgtacaatgatatgtgctcctcagcgtgtaaaccaccacccagccctgagggacagagctttggttgtgggggtctcactgcattctacagatgtttcttttgtgctttcaaagtaacataattgcctcatcaaaagtttgtgaaacaggctgggcgcagtggctcactcctgtaatcccagcactttgggaggccgaggtgggcggattacctgaggtccggagtttgagaccagcctggccaacatggtgaaacctcgtctctactaaaaatacaaaaattagccaggcatggtggcggacgcctgtaatctcagctaccctggaagctaaggcagggagaattgcttgaacctgggaggcagaagtttcagtgagctgagatcgtgccactgtactccagcctggatgacagagcaagactctgtctaagaaaaaaaaagaaaaaagaaaaaaaaaatttgggaaacagataggaggggaagggaaatcacctataacacccctttcccttccaacagctaccactatcattttgtaagtttccttctagtgactttaaatttatattttttcaatttttttaatacttggcactgtaataggcactttacatatattaactacttgaatcttctcaacagtcctcctggataaaaatgaatgaatctcattttacagatgagaaaaccgagtagaggttgagttgctgggtatattcagcttgctggggctgggatttgaacccttgccgtgtgactctggaccctctcttccttccaccagtgcagtggttatcaaatttcacctgtctgaaagtcacctggaagacttgttaaacctattcctgggcctcacttccagagtgtgcgattcagtgaagctgggtgagggaggcctgccatcctgcacttccagcaagcccccaagcaatgccagtgttgctggtatggaaaccatatgttgagaacaattgtactagtccatactgctgccttgtgaagacctcatcctctatcctgatttccccactcattctgaaagaattccactgtgttactatttggcttcacacagatcacttacagtgactacatgagatgacgcatgttctaaaaggaatctattgcttgtttgatgctttggaattcacaaacctgccttagctcagagcccaggaaaatcacccacagttaaatccctccctgagaaggactctctgggccctccagctggcccaaaagggacaggtgcctgagatcattacatcagtgcccagtgccgttcagttacataaatctgacccattcttcaaggcactgttcagctttcacattccccaggaaactcaccctgcctacctcagcccacaggatctcttccttgctgcgcccctgatgcctgtgctactgtggtcagtggtctaggttagaacccgggaactaattttttctcttctagatagtgagcggcccttgggtagcatttggtccagcctttccattttacagatggtaaaaccgaggcccagaggcaaaaagaattgtctcaggtcagagtgctgtgtctataaactccattttgaattaattcttgacaaacacagttagaccttacagttggtttacatttacttcttaaaatgacttcccagatatccctacactgaaaggatgcagacttgaaatagacggacacaacagatactcctttctccgtgctgtgcagcctggagagtgtccccagagctgctgcagtggtcttgctggaaaacccctctagcacctgtgtagaagcatcaggaggagctgcctctattctgtgtcccattccagacatttcagaggtgtatgtggagtccatggcaccaacaggtcttcctactctcccgaggctggagctgagtttacaggtgtccagagttggcagatgggtcctttatctaaatgtgtgaccctgtgttcagagctcaaggcatagaacagcagtgcagtgaataagaccacagctggtttttctccgtgggaaggaaatatgcctggaggcttctgatttcattatctaacaagtgtattttctctgatgtgggctcaaaatggggaaagaataattattcccagcagccccacctctgccgtctcccgttccgggactcccttgacaggctcctcgccagccctgctcctccgccggcagccgcccctcagtagctgccgtgaacatgggcagtgggagattattcttcatttcaatttcattcttttttttcttattaaaaaagcagtgaaggccgggcgcggtggctcacgcctgtaatcccagcactttgggaggcctaggcgggtggatcattgaggtcaggagatcgagaccatcctggctaacacggtgaaaccccgtctctactaaaagtacaaaaaaattagctgggcgttgtggcgggcgcctgtagtcccagctactcgggaggctgaggcaggagaatggcgtgaacccgggaggcggagcttgcagtagtcagccgagccgagattgcgccactgtactccagcctgggcgacagagtgagactccatctcaaaaaaaaaaaaaaaaaaaaagcagtgaaaacacatgttcattatttaaaaatcagaaaatatgaaccaaaaagaaatgaatgaaaatacctcataataccacccgccccagggataaccacagtttaaaactatggacgtcaattccagatcaccatttctcgaagtttcctcaatctctttcttgtttcgggttttgatgcacatataaacacgctatttagtgctatcatttcattttactgtacatgaaagtatgcttatgcatagtggaatctgcttttttcacttagagaatcttgggtacctttcatgtcaatggttgaaaaatctaattcgtccttgttaaatagtatttaataattaataatgccaaagcattgattgacataatctgcctttattggttatttaaattatcttcaaattttgccctacgagcaacacacctatctgtgctcttagctggttacagttatttccctggttattttttaaatggggaagctttctattcatttgttggaggaaatattttccagtcacatgctgtgtgccagccatggtgccccattctggggattcaacagtgcctgagacaaggtccctgtccttgcacttctggaaaaggggcatggcttatcagtaatacacatgtagatttaaaagaccattgcagattgtgataagtgctgtaaaaaatcaacagggtggtgggattgagggagaaggcagcggagctcctgtgacagagctcagggaaacctctctgaggaggcgtttttgagctgagacctgcaagagaggcagccagggctggaggagctgtgcaggtgctgaggcaggaggggctggtgcccctgaggctggaaaggcaacagagcagagggagtcgggggcaactggtctaagaagaagttgaagttggctggagccaggtcactcaggtttccattggctgcagccagtatgtatatttcattccaagaactatcaatggcagggaggatgaagagacaggaaagggcatggtgagggagacaggggttgcgagtgggggaaggcacagagaaaggaaggaatcaaaggggactttggggttcatccaggagggtcctggtgctgattccttgctgacattcagagtgtgtgccctccgttgtcttgataaagggaggggagcacctcctgccgtctggccggtgccccttctggtggcagagcacccttgggtcagcgagcgcttttctgctcctgcaaagtcccgccagcctctaagagggtggatttctatgccagaggcctgggtctccaccagcaaaagagtaagttctatggcaagaaacccctccagaacatgtgttgaaatccttttgcagagttaccagtgcacctgaattatggtggctacaaagctgctagggcattccccggatccgagcttggaggaggccaagcctgggcaatttttctgactttactgcaccatcatccccatgagggaatctggtgttgggggaggaggggcagggagtggccgcggaggccactggctcatacttgacctggcagtgctgtccaggtgtcctggcacctgtgggacattggtctggggacaaagtacatccccacagcagctggtaagagaagggtgctgcctacgttatgtaggcaaatggatttccaactaaatttcacaaagcaatgatggtgtcttgacaaaaaatgagcgctgggcagggtggcttacacttgtaatcccagcactttgagaggttgaagtaggaggaccgcttgaagccaggagttcaagactagcccaggcaacataatgagactcccatctctacgaaaaaaattttttaaaaattgctgggcatggtggtgcacacctgtagtccgagctattccggaggctgaggagggagacttgcctgagctcaagagtttgaggctgcagtaagttacaatcacaccaccgcactccagcctgggcaatagagcaagaccatgtctctaagagaaaaaatgaacagttaactgttcaagatccaagtgcagtaagtttcgttagtgtttgagggtatgtgtctgtgggtgtgtgcaagtgtgtagagccctttaaaaagctaggctccggccgggcgcggtggctcacgcctgtaatcccagcactttgggaggccgagacgggcggatcacgaggtcaggagatcgagaccatcttggctaacacggtgaaaccccgtttctactaaaaatacaaaaaattagccgggcgtgttggcgggcgcctgtagtcccagctacttgggaggctgaggcaggagaatggtgtgaacccgggaggcggagcttgcagtgagccgagattgcgccaccgcactccaacctgggagacacagcgagactccgtctcaaaaaaaaaaaaaaaaaaaaaaaaagctaggctccgtgagtcatggcccaaatccaggagccctgggctctgacaaagtgcagagccttggttcccattccctggtggggagagaaaggccttgtgcaaaccctcccctcaggttagggcaccagtcaagaatgcaaccctaattaaaacgtgaggcagtcagtcaattacagttccatcgtggatggaagttctcctgatttcaaacttgggccttgtagacgggaagaaagaaagaagagacattgagagtccttcccccaggctatttctggtgagccagttactggggttttatatacattttctacaaaagaacaaatatttgggtcagatgaagtggctttgcagcaggctgggttttgacatgctgtaaatagtcatccataatggggcgaggctggctacactgagccattgctgtgcttaaatcctggttctcctcggggcccgtgggcagtcagtccagctgtgagctgatcacccctggcccagcatcgtgtggtcgaggcaggctgtgcctgtcaaagcctgagagggggtggggagtgtcaggctgtcttaccacctgccagagggaggctctggaagtgggaagaagggttgggctgaggctggctgaggaaactgatgtcattggcataaacaagacataactctgctttcacagagctgatgaaacgccattccatagctccatgtcctcagggctggtgtgaggcctgaactgggtgtgatgggggtgaggaggatgtgaattcactggggaaagcaccttaaaagtggcaacattggagtgtggtcttcagaatggggactggtgccatggagacggggaatgtatggtgttgggtaaggtcgggcattaggagatggcactggggaggcagacagagtcagattttagatgattgtgaaggccatactgagttgtatctcctcaggatacagggagccgtctggggacttctgtgcatacaagcgatgggtcacaggtgcacatttggaagatggcctgtcaagtggaggctgagctaggctggatcagggaaaggctataggctgatcagggagaggctagagaccactgggagccatagagtccaggtggatatgacagtcctaaacaggacagtcatagcgtgacaaagaatccacagggctggggaatggtttgggtgacatgatgaaggggaagtcaaattcagctcccaagtttggggaatgagctgcggttgcacgtaaatcaattttctgctccactaagtttattcatttaaatgcccgaacttaaattaactgtttttggatggaaagctttctaaatagtgaccactgaacatcaccctctgcctttttcaggaaaggaagtagaacatattgtaagcatagtgcgatgggatagttgctgtgaataattgcagctatccttattgtcagttgcctcaaggcctggtgaggtgtttggaaccctttgccccagcaatgaatggccccaggctgttgtgcttagctagttctgggttttctttctttctctctctctctctttttttttttttttttttaaaaaggaaagctgttgtttccctcctggctcttcccttctttgctttcagctgtcatttctcagtcctagagctttcgagaccctcatcctccggctatttctaatcttctgccccgggcttttcaaatctccaactcctcttaaagtatacagcctctgtgatggctgtttccttaacttgtgggtttcttcttgttgcttccccttctatagctttattgcagatgactgagctttcagtgcatggggatgtttctgtatttcttgcgtattccccgcagtgcctagatggtgctgagcatgttgctgatactcagtaaacatccatggatttaagagaagtaaatagccaatcagctttgtgtgtgtgtgtgtgtgtgtgtgtgtgtgtgtgtgtgtgtgtgtgtgtgtctcagcaccagagaagtttaccttcagtttctcaaaagctggagttgcaaagccatctttgagagccacatttttttctccctcaaaatatggtcttaattgtgtggtgatagccacagacaccgcctggaagccttcctgtgcttcaggagcagaatgactctcctcattgtctgtgggtttaggcaccgagagctgcacagataaaagcagatgagtcacaggtgtggatctgctgggcggctcttgtcgttagcagtacaaagccacaggtgcgcattcagcgctgcgaagcgggaagaggagccctgacgattctgagggtctcaggtcaagttagttacgtggggacttgaaaatgcattggagatgcagcctggcttccgcagccgtggagaaaatgagaatgatttttgctatttgcttttggggcaccatttaagcccatgtcttgctaggtcaacgttttcatgcccatagctataaattaaagagatgccttagacttgggagctgtttctctgactagaagctgcgtctgtttattcccttgcagttgctaggagcattgcagaccagaaggaaggaaatggaggatgaatgattttaagcatattttccaagagtaatgaaaccgaaaacacaaattcccacacaccagaaaggaactggtttccatccagtgtagaaaaagctcctggcaagatccagactctctgataatcattcccctttgctagggtttagctgggccaccggcttgattgaaagcccgggttcagcggaatgtgtgggcaaagtgtactaagcaggccaagtctatgcaaaccaggatctgaatcagttatttaaaacaacagacttgggtaaaatcaacagtcattctaatctagtttatctgggagcagcagtttatctcacagaacctcatttagttccatgaaattgagattggtttcttgatctatgagattgcaacttggtgtggtattgtggccttccatcattttaatgaggtccttaatgatataatcccactcttggatgagttgaaggtggcatccctcttgctggagagactaggatgaaaggcattttcttttacgtaggtgacctggtttttgttttcatgaattcagaaaggaattagtagacaacaggttctgctatctaattattaccataaagaagggttgctggatacttaggctaaattcgaagtcaacactttcggtataggctctccagcattcacttggcgtacagcctacagcctgtctcagtttatatattgctgtgcaaaaatccacattaaaacttagtggccattgatctatatctctgttttggtaccagtaccatgctgttttggttactgtagccttgtagtatagttttaagtcaggtagcatgatgtctccagctttgttcttttggctcaggattgacttggtgatgcaggctcttttttggttccacatgaacttcaaagtagttttttccaattctgtgaagaaactcattggtagtttgatggggatggcattgaatctataaattactttgggcagtatggccattttcgcaatattgattcttcctacccatgagcatggaatgttcttccatttgtttgtatcctcttttatttcattgagcagtggtttgtagttctccttgaagaggtccttcacatcccttgtaagttggattcctaagtattttattctctttgaagcaattgtgaatgggagttcactcatgatttggctctctgtttgactgttattggtgtataagaatgcttgtgatttttgtacattgattttgtatcctgagactttgctgaagttgcttatcagcttaaggagattttgggctgagatgatggggttttctagatatacaatcatggcgtctgcagacagagacaatttgacttcctcttttcctaattgaataccctttatttccttctcctgcctaattgccctggccagaacttccaacaccatgttgaataggagtggtgagagagggcatccctgtcttgtgccagttttcaaagggaatgcttccagtttttgcccattcggtatgatatcggctgtgggtttgtcatagatagctcttattattttgagatacgtcccatcaatacctaatttattgagagtttttagcatgaagggttgttgaattttgtcaaaggccttttctgcatctattgagatagtcatgtggtttttgtctttggttctgtttatatgctggattacatttattgatttgcgtatattgaaccagccttgcatcccagggatgaagcccacttgatcgtggtggataagctttttgatgtgctgctggatttggtttgccagtattttattgaggatttttgcatcaatgttcatcaaggatattggtctaaaattctttttttggttgtgtctttgccaggctttggtatcaggatgatgctggcctcataaaatgagttagggaggattccttctttttctattgattggaatagtttcagaaggaatggtaccagttcctccttgtacctgtggtagaatttggctgtgaatccatcgggtcctggactctttttggtaggtaagctattgattattgccacaatttcagatcctgttattggtctattcagagattcaacttcttcctggtttagtcttgggagagtgtatgtgtcgaggaatttatccatttcttctagattttctagtttatttgcatagaggtgtttgtagtattctctgatggtagtttgtatttctgtgggattggtggtgatatcccctttatcattttttatcgtgtctatttgattcttctctctttttttctttattagtcttgctagtggtctatcaattttgttgatcgtttcaaaaaaccagctcctgggttcattaattttttgaagggttttttttgtcttcatttccttcagttctgctctgattttagttgtttcttgccttctgctagcttttgaatgcgtttgctcttgcttttctagttcttttaattgtgatgttagggtgtcaattttggatctttcctgctttctcttgtgggcatttagtgctataaatttccctctacacactgctttgaatgtgtcccagagattctggtatgttgtgtctttgttctcgttggtttcaaagaacatctttatttctgccttcatttcgttatgtacccagtagtcattcaggagcagcttgttcagtttccatgtagttgagcagtctcgagtgagtttcttaatcctgagttctagtttgattgcactgtggtctgagagacagtttgttataatttctgttcttttacatttgctgaggagagctttacttccaagtatgtggtcaattttggaataggtgtggtgtggtgctgaaaaaaatgtatattctgttgatttggggtggagagttctgtagatgtctattaggtccgcttggtgtagagctgagtacaattcctgggtatccttgttaactttctgtctcattgatctgtctaatgttgacagtggggtgttaaagtctcccattattattgtgtgggagtctaagtctgtttgtaggtcactcaggacttgctttatgaatctgggtgctcctgtattgggtgcatatatatttaggagagttagcttttcttgttgaattgatccctttaccattatgtaatggccttctttgtctcttttgatctttgttggtttaaagtctgttttatcagagactaggattgcaacccctgcctttttttgaacagagccctcagaaataacgccgcatatctacaactatctgatcttcgacaaacatgcaaaaaacaagcaatggggaaaggattccctgtttaataaatggtgctgggaaaactggctagccatatgtagaaagctgaaactggatcccttccttacaccttatacaaaaattaattcaagatggattaaagacttaaacattagacctaaaaccataaaaactctataagaaaacctaggcattacaattcaggacataggcatgggcaaggacttcatgtctaaaacaccaaaagcaatagcaacaaaagccataattgacaaatgggatctaattaaactaaagagcttctgcacagcaaaagaaactaccatcagagtgaacaggcaacctacaaaatgggagaaaattttcacaacctactcatctgacaaagggctaatacccagaatctacaatgaactcaaacaaatttacaagaaaaaaacaaacaaccccatcaaaaagtgggcaaaggatatgaacagacacttctcaaaagaagacatttatgcagccaaaagacacatgaaaaaatgctcatcatcactggccatcagagaaatgcaaatcaaaaccacaatgagataccatctcacaccagttggaatggcaatcattaaaaagtcaggaaacaacaggtgctggagaggatgtggagaaataggaacacttttacactgttggtgggactgtaaactagttcaacccttgtggaagtcagtgtggcaattcctcagggatctggaactagaaataccatttgacccagccatcccattactgggtatatacccaaagggctataaatcatgctgctataaagacacatgcacacgtatgtttattgcggcactattcacaatagcaaagacttggaaccaacccacatgtccaacaatgatagactggattaagaaaatgtagcatatatacaccatggaatactatgcagccataaaaaatgatgagttcatgtcctttgtagggacatggatgaaattggaaatcatcattctcagtaaactatcacaaagtcaaaaaaccaaacaccgcatgttctcactcataggtgggaattgaacaatgagaatacatggacacaggaaggggaacatcacactctggggactgtggcggggtggggggaggggggagggatagcattaggagatatacttaatgctaaatgatgagttaatgggtgcagcacaccagcatggcacatgtatacatatgtaactaacctgcacattgtgcacatgtaccctaaaacttaaagtataataagaataataataataattaataataaaagaaatcagagaaaaaaaaaacttagtaacctaaaagaacaacatttatttgctcagaattctgcagtttgggcagggctcagcaaggatggttcatgtttgctcttcatgatgccagctaacatggcttgactgaggttgcaagatgcacttccaagatggctcactcacatgactagaaagttggagctggctgttgactgggaactcaactgctgctgttgaccacagcttcagttcctttccatgtggcctctccatgtggttacgttgggcttttcacagcatgatggttggattctgaaataaaggatactaaaagttctaagagaacaagccccactgtgcaagcacttattcagcctctgcttgtatcatgtttggtcatatctcattggctaaaaccagtcacatagtatgatgagcagcataatggtctcccaaagatgtccatgtcctaatcgcagaaaactgagtatgttatcttacatggcaatagaggttttgcagatgtgattaatgttaggctcttgaggtggagaagctatcttgggttatgtggtgggctcagtgtaatcaccagggtcctttatttttaatttttgagacagggtcttgtaggctagaatgcagtgacacaaaaacggcttactgcagtctctatctcctacctcccaggctcaagcaatcctcccacctcagccttccaagtagctgagaccacagacttgtgccaccatgcccagctaatttttttaaattttttgtagatatggggtctccctgtgttgccccagctggcctcaaactcctgggctcaagtgatcctcccatctctgcctcccaaagtgctggatttagaggtgtgagccactttgtccagcccaaggtccttacaagtgaaagacagagacaggagagtcagagtcagagaacaagatgtgatgacaggagcaatgatgagagtgatgcagagtttgtctttgaagatggaggaaggggccacaagcaaaggaatccatgcaggctttagagcccagaaaaggcaagaaaatgggccttccccggagcctccagaaggaacatccctgccaacacttctacttcagccaagtgagactcttgttagactgctgatttccagaaccatgaggtaataaatctgtgttgttttaagccactgagtttgtggtaatttgttacagcagcgagaggaaacaaatgcacatgtacaaccccagagtctgtgtgggaggggccatacacagaggcatggatctaggagccatgtttggttgggggtgtcaccaaagtaacagtccattattcaaactggcagacatttgacagaccagaatctcatgtcattttcttcaggaagtagttttgcccagagttaaatattttatggatgccttacagtctttctgttcaaggtggatgttccattatctatgcttcccactggttccaagttgaaattgtagctgccacgctgaatgtgataccacttcaggcccttgtgttggagccactgtaagctcccctttcccttccccaatttttattatgaaaaatttccaacatagagaaaagtttaaagaatagtacagggcatttagggatacctaccacctagattcaaaaattattaatattctgccatatttgcttaatttatatgtgcatgcatatctatgtatattttttgctgagctgtttgaaagtttcagacatcaagtaccttcacccctaagtactttttagcacatgtgtcctaactatagggacattctcctgctttgccacagtggtcattacacctaataagataaaaaattctccacaatcatctaacatacagtctacattcaaatttcccgagtggccaaaacaaatttttagaattgttttttaaaaatctattcatatgttacatttagttattgtccctctagtctcttactctaaaataaccctccacttttttccctttcatagcattgactgttggaagagaccaggccagttatcttgcagaatgtcccacatagtacatttgcccagttatttccttgcagtgctgtctaacttattcttctatcccctgtatctcctgtaaattgaaagttatattcaaaggctagactagatgcaggttatgcacttttcgtaagaatatttttataaatgataccatgtcctgcatatggcatcacttccagcacataatgtcaggtgtcccctgtagttgacttggtttaatcattaggttaaagggatgaacatgaggcgatgccattgtgaaggtagatttttttccttctgtaattagcaagtaatctgttcgggtggtactttggcaaggagcagatatgctgtttcccaagaacttgtcacctaatggcttttgcatcccttggtaacccttatgtgaggtagcaggggtattgtaaaatggtgatttttaaaatcctatcattctttctacatttattagctgaaagtttttgtaaggaagacctcatgtctctctttgagttcttccttgcttttaggcacaatatgccccagacaaattgtatttttattgtttcaggcatagaatccgtgatttttctaaagaatcctggttctttttagtgggacttacctcttaggcactagggatgctcgttctaaggccatttagtggatagagctaggaaacatagttaataaattatgcgttcaaactgatgttttgaattcagatttagaactcaagatttttttccttaactttttacctttttatatatatttctatatgttttctcaaactgaatttttgtttgtttgtttttgctcttgttgcccaggcctggagtgcaatggcaaaatcttggctcactgcaacctccgcctctcgggttcaagcgattctcctgcctcagcctcccgggtggctgagattacaggcgcctgccaccatgcccagctaattttttgtatttttagtagagatggggtttcacgatgttgaccaggctgggctcaaactcctgacctcaggtgattcaccctcctcagcctcccaaagtgctgggattacaggcgtgaaccactgcacccagcatcaaactgaaattttgattcctgtgcgttaacatgtttacctgtttgtgtataatacatatattcacataaaatagtcttaaacttataacaccaatattattactaacaataaaactaccaagtgaagcttttcttggcactttctttttgtccttagaatatatcccgttacagatgtacgatcagagttcaaatgagttgaaaagtcatttgaaaaaattctttgtgtgattatgttatcaattttataaacagttagcttcatgtgttttggactgtaaggtttaccccccttttaaaattaattttgtttcttagaaaatataaaacattatatagcaggtcctcaatgtcatccataagttgttggaaactgtgactttaaatgaaatgacatataacaaaaccaatttttttcctcacagtgttataagacaatgttgaatgaaatgatattattccaggacctgctgtatgtcatttcacttaaagttgcagtttccaagaaccttaacaagggcattaagtgaagactttatatatgtggtttaaaagtcaaaaccatataatacagtaacctcatagaaatcttgattccattcctgtcttttctgctccattctcctatatagataaccattttgctagttttttttctttccagtgcatctttttgtaaaagaaaagatttcatactcattcttatttctccttctttcttagacaagagcagcagcatgtcctctatattcttcttcaccctgcattgtccgctttttaatatagccttgaaatccctccataccagcccttcaaggccatcctctttgtccattgcatgtacttctccactgtgtggctaccccggaagggattcagcaaattctctgtccataggctgttgggttgtttccggtctttttcttgcacagacagtgctgcaatgagtaatctctagtgcatgtcatttcgtacatgtgaaggcatatcagcaagggggattgatgggtcaaaagatgaaaacaggtgtaatttgtcagatattgctacattctcctctctgggggctgtaccattttgcattccctcagcaatgtgtgagaacacgtgtctccacagccttaaccacaaaatgcttgtcaaacttaaggctctttgccaatatgatgaatgagaaatgagtgtttctgttttgttgtatgtttatcttatgagtaaggttacacatttttttcataggtctaagggccatctccccttttctttctataaactgtgtacatcttttgttcatttttctgtcatgtgattggtctttttcctttcagagaatttctaaattagagagattaagcctttttctctaaattgcaaatggtttcctttcttcgttttttcattttttaacttatatttttgcaatgcatttattttatttttattttatcagtcttgtatttcaaatcgtaatcagaaagacttttccactccctggtgattaaggaacagtccactcatgttttcttctagtacacatagaacttcattatttagttagctgtctaatgcatttggagttttttttttttttctggtgaatggtatgatagggatccagttttgtttttccaaaaagttatgcatctttcccccaaaggtttgagatgctacctttatcatacaccaaatttccacatggggtctatttgccaactttctcttctcttccattgatctgtcagacccaaggttcttgaagttcatcttgacccaggacagtgtgcctctgtcatattcttccatagtcgagagccagcccaccccaagatggtgaaagcccaaaactgagcacttagcctgcagcgtggagtggcacgtctattcctgtggatactctaaaagctcttcctggctcttgctggactgtcagggtactgtgtaccaatctgtgctattttggctccttgtggaattgcttttgataaacaaggcttattagtgacaggtcatggccttgtactgagggatgtgctaaggaaaagccctgtaaaacccaaggtgttgagaattcactacatcattctctcacgcctgattttatttttcctctttttacccagctttcctgacattattttccttttatctttttaaattatgtgcatctttgcaagcagttctggagtatatattgtcgaaagaggagggaaggaaggaagggaatcacataagactgatgactttctgctgcagtgaaatatggaaacggtgcagagtccttgatttcaggctggatttactgcactcctcaaaggaacttttcttggacaggtttacctaatgcagaaaaacaccttttcttccaggtcaagcagctttcatcctttaaatctaatcgttttcagtgagataggaataaatgcagaaggattttcaagctgatacaggttcagacacgtgtgttagatgccacagtcagcttgaagcatttgcttttgactttgttgaacacatctgcaccttgactcatggtggccatcgtggacgtgtgctggagtaaatcctgtattgtccctgggaccaaatgcagacctttctgcaggcatccactgccatccagtcacttgtttttgtacatgacgtgttatctccctcacttcatgatacttctccctggtccagtgcccattgaacttgtgcatgggccacaccacctcgaggaggccttgactgctttgttccctttaggcccccatttgcttcagtacctagccctgagctctgctggtacctaaggtggctgcattggccttgcttcctgcttcatcaatgcctctgcacctttctccttgcctgggaaatttctgcatttgttgtatttgatcaagcatccatgtaaatataaaaattcctgcatcacaaatcagtctgctgcatcttcctaacgctgataatggccttggctgaggcccagttgtcccttcctggatgaccaggctcccctgagtctcagtgtctaaaccgttattgtgtcattatttcttatccgaagggcccatatcccttagccaaaattctgaaatagaaaaggctctgcaaacaggaaatcatttgacagcaaaacccagcctaaactgacatgaggccatttatagtccttatttatcccaatagatgtgaatccttataccttttgctgtggaaatatgactgtgtctgattctggagtactgtcccagaacctgctgggagtatcatgatatatgacgtttgtcatctgaatttcaaaacatatctggtcccaaggacttgtgataagggattatgagcctggaggaaatcagaggctggagatgcctgtaatttcatgtcatatgactgtcaggatagctcgtgcatagaaatgacccatgcctaggtaagtaaaagtatatgaggcccaagactttgaaaatactcaaagtattagtatactaatactttgtatactaaggacttccccattcctggaagatccacaggacgtgtgagaagactaggaaagaggttcccaaatcagaatatactagatgtccccagtccccagagtttgtcaattgcaggtgctctgacaccagcaggtttctggatttacaaatctaagaataataagatttgaaacactttccttattccaggcactgttctaagtgctcagtatgggtaatctaatcagatccttgtgacaaccctttgaggcagttgatatcaccatcccttaaaccatgaggaaactgaggtccatgcaggttaagtgaatccatatcagttcagatgcccgaaaacacaaacctcaccagctatttaagaaaagattaatagaggggattgggagtttccagaattagaagggcctagaggagcaggatggaggctcagcttccaggagtgattctcaacaggacactgcatggctggaccctcaagattgctgcttccacagtcaggaaagttgagaatcaggactctattgcaggaactgtcaaccccaggaacacccactcaaccaccttctggggaccaggagaggtgaccatgactgtttgcttcagagttggcatgccttttgctgcacctgcaatctgcttttcagcacacctgcaaaactggtgactggtctccttgcctgtgcttgccagagaacggcagaatctaccaccgtatggcctccacctcatttccttagcttctcaaagcatatgcaaacacgtctgcttggtagaatcttaaacacatctagaacctggaggtgcaaaggaataggtcgttgtcattttgccaactttggcatacagcaaggcacatggggaggaaggtccaatggatgttgattgagccagtctgcagacccacacattaaataacttcccagagcttacacaggaagtggtggatccaggatttgaagccaggctgtgtgttcccagcatctaagctctgtgaagtgtactgcctcacaggaatcccgtgagctcatgcttggggctggctggactccatgacaaacatgtcttctccatattctgtttcttcagcaggttcacagctctagtccatgtgtctgtatggtacaaggaggactcttgagctggctctgaatcctttgaggactgattttgatggtgtctatctaatggctattgactggttgtatccattaccctttgatctaacaatgctgcctaacaagtcaccctaaaattcactgacttaaaacagtagacatgtaatattgttcgcctagtctataggttggctggttcttctcagctgggttcactcatgcatcagtggtcagctgcaggtcacttaggtggctctgcttatcttggctgggacctgtcacatgcttggggttagctggctgatctctcactaagtaggctggtttctcatcctccaatagtccagccagtgtgttcttatagcaatttctgagaaatgaaagaggaagttgaaatgtgcatgcattttcctaaagccagtcacacagtcatgctcaaggtcatggtggaaagggtacctcaaagttgccctctctggatacagagaggccattagttggggtcatcaactaattagagaaccttaggcacaatgtttaacctctccaatggcccatacaactgaactccttggaaagcatagcttggatgagaggcgtggagaaccaagccctctggaaccctgcatgttaaatctaatatggaattcagcacccaggggctatctagcgaggctctgcctaaatgaaatcatctgttcttttggctggctttattctgtgctcaagccagggctccccagctgactcagggacacagccattaacttgtggggcctgtgcttaacagagctgcttctcaacaaagacagtcttttgacatctcaagcggcaagctcgatcgccaattaaaaagctcatgtcctcaatgtgacaaataccggggaaaacaagtctgcaattcagaacacaagtggaggaacatgaagcaagttcatcatgacggcagcaccggccttgttggagctttcatctcgcctctcggtgagacagagcacgactctcccaagatttcccaggtcatgccgcttagctgggcaagacgtgccgccaggccgagatggttcaccctgcttcatgggatcatgtgaagggtcagggttgtttttctatagcttagattgcggcctgcacatcttacattttcttaattcatatttaataaccttatagggctctccggtggctgtgctgtgagacagatcaggaagccaaggtcgtccatgcagccaggatcctggggttccttagggccctgatcccttctctgcagaacattaggggctgcccccaagacttcagccctagagattcaattggcagcttcgatattgaaagactaaaaaaaaatggacattcctcccgtttttcttttggatccgtttccctttgaagtgaagttgcactgtctccccaggtccccagtgaaagcagagttgtgtatcctctggtttgtttctcaggagatgtgttttaactaagttaataataataataacaacagctttattgataaatagttcacataccctataatttacccatttaaggtatacaattcagtggtttttaatatagtcacagatatgtgcaaccatccctatggcttatattagagcattttcatcatctcaaaaagaaaccccatacacattagcagtcaatccccatttttccttcccccaatcactggcaaccactaatctattgtttttttctttttcactcaaacagatttctgacagatccactttctatgtctatagctttccctgttctggacagtggatatcaatggaattatacaataatgcggtcttttgtgacttaattctttcacttagcataaactaaggaaatttttttaagtttgtctttgaagccagatggctgagtttgaatcctggctccacatcctactccacttacctaaaaactggtttgtttttaggtaagtgacttaacctctctgtgtctgtctcctcatcttaatacagagagaattccagtgatcactcccatagaactccctgggtaaatccatgtaaaggctgtatttgagctgtgcctggaacacagtagggacccagggaatgtgagttctcatcatctttcttgtcctgtgttccctgaaggcctttctagctctgtttggggagccttgcttgtttgttttcattcccacagcaaacatcagtggcagtgtggacagctcttcccatatgaattgcacctgggtcatggggactgggaagctgtgcatgcgccttgcaagctctcacccaagtctagagcctcctgcatctccctcttcccaaggcagcctcatggccccacttgaggctctgaggttctgcctttaagggaatagaaagtttttctccccagctcccagtgaaagcagctgtttccttgtgagtgtcctccaggtgggagacggagggattttggacgggcacattagtccattttactcctcagggtttaagttaacaggaatagtagaagggatcaacgttgacccagaaaactggcccacaggcctgctattgggtaatgtactagtccattctttagttgctataaagaagtacctgaagctgggtagtttataaagaaaggagttcatttggctcatggttctgtagggtgtctaggaagcatggcactggcatcctctcctggagaggcctcaggatgcttctaatcagggcagaaggcgaagagggagcaggctgtcacatgacgagagggggagcaagagaagggggaggtgccactcttatttttattttttcttgaaataggtcttgcattttcacccagtctagagtgcagtggtgcgatcacatctcattcaagccccaatctcctgccctcagttgatcctcccacctcagcctcttgaatagctgggaccacaagcatgtcccaccgtgcccagaaaaaaaaatttttttctttttttttttttagagatggggtctcactgtgttgtccaggctggtctccagttcctgagcccaagtcatcctccaaccgcagtctcccaaagtgctaggattacaggtgtgagccatcatgccttactgtcacagccagcagtctcatgaactgagtaagaactcactcatcaccaaggggatggtgccgagccattcacaagggatcctccagggtccaatgcctcccaccaagccccacctccaacattggggatctcatttcaacatgagatttggaggggtcacacatccaaaccgtgtcagatgggaagctgagaaaagtgacatctgcctctgaaatagttctgggaacgtcactggagggtgactgccaggttcactcatgccatcagccccgcctttgtgtcctcagtaatttttactctgagcataatcacagccctcgttgagaggagccactgtccctgttggtcttctttctagaagtatctcttatatactgatatacagcagtgcatttacattgttaactgtaaaaatgacaccaacacatttagaaaggccaccagataaaataaagaaaaatgtatccctcaacgctgacatacttactggcttgcttttggaacgttcttctttctgtcttcaggtgctagaactttaggagagtaagtgggctctgttgagggactctgaagactggtcacccccccgcccacacacacacacacatcccccagcacttgagctgcgcttccacataaccacttcctttatgctgggactgtggtttctttgtgtgtttttatgtcttttccatgtctgggtctgggtttgcctcccctgagagaccgtaaacttctaaagaacaagaactgtgttgtctccttttataggagtgtatgtttcattaaaaaaaaaaaaagtaaaagtaaattttaaaaaacgtttcttgtctatgcctacgatgttcttattgacttgagggtttagacagtgtctctgaaaattctctggcaaacactccctggccccaccataaacagctggttgatgtaaccacaccgtagctcagtcaccacgtcacaggagctgtgtcttcttctgcccgggaactacctgtcctgtgtgacagaaaaatgcagcggttgccagccaagggcccacaggcaggattcccctgaagctgtgggactttgctaacaatgcatctcccacattgaggcttttcagaaatgcgattgaaaatagaagtgtgggtgcagcattttccttcctgccacatgggaattctggggaaagagctcaccttgaaggaacaaccttgctgggagtgcagtggggggacctttcccctggagccggagcccctgctgggttctggcagccccaggatgcccactgagctctgcttctctgggcaccctgagaaatggacggcagcggccctgactccgggctaaggcagggcttcaattaagccagagaaacacgatttattatcagcatgttttcagttccaagccgtgctttgaaaaggtcaccttatatgaatatttagaaaaagcaagatcataaaataagagggacttggtattttgttttgtattttttttttagaagaaaattcgggctcactggtaacttacaatgggcaaactctagcactttttatttaacctgcatttaccctttaaaaatggggaggaggttttagaactgcatttgaggagactttctgtgtccaggggattttacagcgtttgaaaccagggcagtgagccttacacccgggacccaaggtccgcttgctgactaaatgcccattaaaacagcaaatgaggaggccaggtctgctttgaagagcctagcctaattgtgttgtatttgtgtcagctgatggctacttttttcattagggacttttaacctgtgggtcatcttttgaaatacacattcgattgagtcagttcttcctttaagacctcaattggctctccttgcccgaggagaaagctgggcccctgaccctcccgccccggccccttgagatctggacacagccttgcctcagaactcagcctgtcacctcccctcccctcctgtcacgtcctgtgtcccattccagtcccatagtgaggggacttagtggattatattgtaggatgagcttagttaaagattaaacgagtatgtttattctttatttcacagagtaattgttttaaaacgaattttatttttatgcttagtaggatggattttatttaaacccccaggcagactccatttaaatctgtctataaattgtatagtcttgatgtttttgtataactttgatatacattctttacaaaatcccggttttatttttacaagatgaagattatacattttaaagcagttatttcgtcagctttttctgtctccttgtataatcatatcagaggactgaataatgatttcgttatttcatttgcacagtctctcgtgactgctaagcactctgcttgtagttcctgttttttgctattcctctgttcttgcgtttttttctgcaatctctccccgccttgcccagatctcttcctcaatgatttttttttaaattttgtacaacaaatattcctcggtgcctcctgcccaccagacactatgccaggtgccaagtgtagaatgcagattaaacagccaggttgtctaccccttggcacttggcatggaattccgtggcgcctttccattaaagagggctaagggctgtcagctgaatttgacaactcgtagaaacaggaacagtgggttggggggggggcatttatttctctcgcatctgcagcctctgtgcaatcagtttgtcatctctgaagacaaatttattgtgaattaaataagatcaccctttgatgtctcttgaatgtggcctcttctcaggcctggctccttctggtagagctgttgtctttagttgctgacattatcaataacaaaatcttggcccacccataaaattgtcccacttccataatccttgacctcttgtgactgattagtaaagctctgtaaaaaggttacctgaaaatatattttataaataccgtgtattatgattcagagttacacctcgtgcctaaaatatgttcttcaactttaacctattttaagttgaaatagttttgctagatttggttggtttatcattactgttgttatcaacattggtttggtctgttgttagtgaaggtctttgttaaaaagcaaataaataagtggaaatccagttaatgtaagatattttggtttgtgaattttatttgcctttctgctctaagaagtttccctgaggacaggcagacaagtttgccattgagtgatgaagagaagcgtcagctgagggatggtctcctgattttttttttttttttttttttttgagaccgagtctccatctgtcaccaaggctggagtgcagtggcaccatctcggctcactgcaacctctgcctcccaggttcaaaagattctcctgcctcagcctcccgagtagagtctcctgattttgtaaattctgccatgtggttcatttgttagtcagccacagttaggcactgaattgtgtctccccaaaattcacatgctgaagccctaattcccaatccctcagaatgtggctgtatttggacatagggcctttaaaggggtgattaaggtgaaacctgattggtgtgtttataaaaagaagacacacagagggacacaggaatgtgcatgcaaagaggaaagactgtgtgaggacttcgtgagaaagcggccacctgcaagccaaggagaagaggccccagaagaaaccaaacctgctgacactttgatcttggacttctggcctccagaactgtgagaaaataaattcccattgtttaaaccacccagcctttggtattttgttatggcagccctagcaaattaatgcaaccaccaagcctgttgcaaaggatttttcttccaagcagattcctgtttgatggtaggagccagtatcctccccattgttgtagctggagggggccaaggcagagaagactgccggccctgggccttggtgcaatggggcagtgacagcaatgggactgagagggagccacctccacagaacccccagcatgctccccatagcagctgagtgcttgtagagctgtgccaggaacccaggaagatgcaggtggaaacatttgttctagaatcttcggagcagtgatttgggctatgctcaggagtgttcattctcttttccgtggatcttcacaaaatatccgagaactaaatctgaaacgtctctagtaaggccacgtgatgcgtgcgtctagcacccacgagtgaggagccggaaacattctcccgcgccagctctgcggggttctggctacttgtgcttgggtgtaaatgctcgcattgcgttttctgttcctgccacattgcacgcttcagcctgaatgcagcgttatcgctgctgtgggaatttttgacaacttatttatgagtattaagatcctggagtcttcccccaccaaaaaaagggggtagctatgcctgcacttggagatgtttccaggatggcagcccttgtggggtccagtcacccagggctggcaatagatgctgtctcccttgtgcacccaggctggtttgaagtgtgctgacggggacttgcggagacagccaggcagagggagaaaaaaggtggtagggttgctccaggtcacacaggccaccgcagaagcaggcctggctacatggaagggagcagggtggcggcatctcaggtgtcagggccggagcagcagaggtcgaggccttccgaggcccctccccaggcatctgctgagaccctcccttgtgccaggccctgtgccttcccgacgccggggactggagctagaggcatctggtgacaggaacaggaggaggttaaagcaatccgtgccctgagtgagcgcagggtgcagagtaaccctcacatgcacagtgactggtgtaggatgatgtttgaccaatgctgaactcatatgggctctgagcccagaggggccaggtctttggagtctggaatgactaaggcaggcctttcctgtgagaagtggtggctttgagctgtggggacctagagaagagacagccagaggttcttaattctttccttcatcttcctctcctttgattctgatccattaagtggttttggcatggttctggggcccttcccctccaggacccctgcggtgtgagtgctactcctttggccccatggatcacccctcaacccgtcaccttgtgttccccgaggtgggggtgcctctggaattccctgttctgcttttaggagtgtcacaaggattgtaacagcgtcccactggtgctggatggccaacaataaattcccaggctctgaagcaccaggaacaaggtccctgcagtcagatgaaaggtcccctccttgcctggcaagacctattatctgggactctaaagaaaacgtaaggccgggcgcggtggctcacacctgtaatcccagcactttgggaagccaaggcaggcagatcacgaggtcaggagatcgagaccatcctggctaacacagtgaaaccctgtctctactaaaaatacaaaaaattagccaggcgtggtggcgggcacctgtaatcccagctactcgggaggttgaggcaggagaatggcatgaaccagggaggcggagcttgcagtgaactgagatcacgccactgcactccagcctgggcgacagagcgagactctgtctcaaaaaataaaaattaaaaaaaaataaaacgtaaggatgcctgctcctggggaaaagcgtgagggtcagcatgtcagtaacagtgctataggcgtcagtgcacgtctgcaggtggccggcgttgccccagagagggcccgtttgagtcacttactcagcagacaccagggacctactggaagctcatttattcagcttgcccacttgctcattaatttaacacatttgtattgaatgtctgctttctgcaaggcactggtgctcccactggagctgggctggcagactgtttctataaagtaagtattttaggctttgagggccattttgtctgttgcaactactcaactcttgtagaacaaaagcagccatagacaatacataaacacatgggtgtagccttgttccagaaagactctattgacaaaaccagctgcatttggccacaggctatcgcgtgctggcccctggactatgtacagaggtaatcctctatctacatagagcttatgctctaggcaaggaagacaagaaattaatcatataatcacaaacataaattataattatgaacacgtgttctcatagctctacagccaggatggtatgtggcaacctcacgtcaagaactgcttccctcaagagttgctgcttttgttggcatcagaatcagcatgaaccaggtgaagagagagaggaaccagcatgtggaaacaccctgcagtacaagtgcagcatcccaggaatggaaagaaggccagtggtcatagcggagaggagaacggggacaggggtgagatgaggcaggagaggacatgcagctggtgcatgcatggtcttggagccatgctgtgcctccagtctttatctgagtctaatggtgaaggctaacgcagaggagaaacaggatcggatttgcactttgctgcaacatgaaagcagattggggaagagcaagcaaggattcaggagaaccaagtgaaaagactattgcaagagaggacagtggcagtggggaggtgaagagaagtagctggaggtaagaggtatgtcgaggggtcataatgggctgggtatggagggagaaagcctccacaggatggctcctaggtatcagggttgtgcctgattagatggttacatctagatataagatggttggtgtgctctattctgagacaggaagcactggagaagcccagagttctttgctttgatttgtttgggtgagaggaagaggcatgatcagtctgagttgcctttgaaacatcacattaaaggtgtcagataagtaggtgagatgtacagatccggagctcagaggagaggtgggactggagagaatatgttttggagagtcatcagcatatggagagtgattgaagccttgagcatggattagatcatccaggggaagaagagaatggagtaaaaaaagagaagagggcctggcaaaacatcttctaggagctctgatgtctaatagccagggaggcaggggtgattcggcaaaatggggaaatgacgaccaatgaagcaggattaaaaacaggagattgttgtgttgtggaagcaaagggaagcaagggcttcaagcaagacttgcattcagcctgtatgcgcaggcacagtgagactggccacggatgcccagtgaccattctgacttgtcggtgcatgcactgtgatagtggttagtgcccatgccacatcagttgttaaacttgattttcatccctgctttcaaggagtggccaccagtgttgaaagcttctgggatagcacacaagataaagagtggaaaccgtccattggatttagcaccatggaggacactggtgaccttaacaagagaactttggatagagtgatgggctaaggggtgaatgggaggtgaggaagttgacaggaggcctaggcagcctttccagaagtttcaccatgaagcagaggagctaagcaggacaggtagaggagaagctggaagggtatcctggagtcaaaattttactttcaaatgttgaaatgatgagaagtatttgttcaacatacctactgtgtatttattcagttagcaaactgtgtatctcattcatttattcattacttgatccaacatgcctatctcaaccttgagtaggatatttattatgagcactaaatttattttatttcatttccttctttccttgtcaacagccatttattgagcatgtattatttgccaagtactggaccaggtcccagtgatagagacatgaataagttatagcctgtgtgttcacggggcttatagttttttctagtgcagtggttctcaaccagggatgattttgttcctttccccatcctaggagacattgggcacttatctgggaacttatctggagatatttttgtcatgatgtaggggggaagggatgctactggcctctagtgggtggaggctagaaatgctgctaagcatcttaaaatgcacagaacaagcccattacaaagaattatcttgccccaaacaagaatggggtgaaaatggctagattaatatgtgcatgtggtaactacaggagctcagaggatgagcacttggacacacagtggagctggccaagcagaagatgagggacagacaagacaggtggaggccacaggtgtggaaaggcatggagccgtgaagggagcatcgtgcaaactcaggagcttcccgtgaagggagcatcgtgcaaactcaggagcttcccgtgaagggagcatcgtgcaaactcaggagcttcccgtgaagggagcatcgtgcaagctcaggagcttcccgtgaagggagcatcgtgcaaactcaggagcttcccgtgaagggagcatcgtgcaagctcaggagcttccagcagttccgggcagaggcaccgtgactgataagggcggaagtttgcagagtagctgtggccatagatatcataccaagtatcttggattttgtgtctgcgctgagaggccactaaaggatttcaaatgagaggaaaccagattggtgtcttagaaagatcgtcccggtggctgacaaaatcaaacaataatcaccaacatctgttaagaatcaaatctgtgtccagcacttttttgagtactttattgtattatcctgtttagtctcccagcaacccaatggaggaaacactcttgttatccccatctcacagctgaagagactgaggcagaggggtcgggtagcttgcttgacattacgtgagtagtaactgcagggccaggatgtggctcccagactgggcgtataaacaaacatgagatgccctgtggttctttctgtctcctactttgggtctgagctctgggactagatttgagcagccacaggatctcaattcataattcatgtttcaacacttttgcagctgctctaaaaattctatgcctctagccttaaagagtacggctttgaggtaaccacttcttgttgattaggagttctcgcgtagctgttaatttttctaggtgctctggctgaaatgccctatcgacagagaaacacttgagtgaattgtgctgatgggaagtcaaattcactttttgctgcctaagccttttaaatggacccggtatccatacgtgacccctctaccttgtatgactcgctctgccttctctatcagctacttcaccccactatccagtgtaccccttctttatctttgctgggggggcaggggggcgggaaatagatgactttgcctaataaaatttaaagtagatctcagtgcacaaagctgcatcgttagccagcgatgatcctgcttttcagggtttttaattgcggtggttccctgctctgcattaggagccctaatgagaagtgacacccgcttctgacccaggactgatggcccctagggagagggaaactgaggttcccaggtattagtttggtgcaaaagtaattgcggtttttgccatttttttttttttaatgacaaaaatgcaattacttttccaccaacctaatagaaggggctgcacctgtgttccttccacccatgagaagagatttttgtctgaatctcagctgctgagggaggcaggtgactgacaggtgggactcaaggatgactcccacctggcaaatttcagcagcactcctcccatttggaaagaagagcccagacacatttttatatgtatgtaggcttttaaatacatgtgtctctctctttttgaaaacattggcagagttctggcaaagcataggaaatgctacctggtctgtgatctggagggagctccctcctgagaggaaacaggctctgtctatgctacactggatggctggcctagcctgctgccggtgggttctttgaggctggtctatcacctgtgagttcacagccccaaatgatccccaactgacagaaagagccccaggctgtggcctctgtcactagggagtctggaggggcagccagctctgatttctaggcttcttcctataatgattccgtggtaggacagagaattctctgggcttccgttttctcatctgcaaaatataggggttgttggactgaagaccttctagtgtccctagcggctttgactggtggattaaatcagacctttgacaggataaggactgcccatcagtgctaagaaattaatcttatgcccaaacataaggcagttccccactttcccaaagaaaagctttccaaaaactttttagccaacctgaatatattaaatttttttgaatatagatgcaacaaaaaagtatacttacaatgtttaattattttagtttcaaatgttaaaaattacaaactatataaaatgctaaccgggcatggtggctcacacctgtaatcccagcattttgggaggccaaggtgggaggattgcttgagcccgggagttcgagggcagcctgggcaacatagcaagaccccatctttaattaaaaaataaataaaaataaaatgttaatttagaaatatttccacttatatttcatgagtaattattcaaacttgttctgggcagctttgcctcccatgtttttttttcagtgtagtttttttttttttaatcactagagtgactttttgagtcctctgacaattttttggaacgtcatggcactttttgaatgtgaggattagaccttccctgggaattctatcccaagttgaagcaggtgtttttggcttttttttttttcatttggtttataggtaaatattcacagtctctttgcaataatttgttatgattcttgttaaagtgaccttcaaaagtctgtttataataacatacagacactaaaatttatactacatcatatttgtgttaattagagtcttcttactgatacagaatctatcagtggatatattcgatatcttgaatagaaggcaacaccttgttgagggctaatgagggaggagggaaaagatggcatagacaaaaaattttactgtacaaaattctcatttaaaacccctcagcttgttatattgcacgtataagcatttctgtagtggctgtttggtagcctatgtctgtgaatgtaggcagaggtctcttgatggagcccaaagacagaacaccgggtcttctgctgagtcttttgggccccgcaagaactctgaccaacatccttcaccactttccaaacacaaggagccgtaagccccttctgaccacctttctgccaatctgctgttgggcttttgtgtagtttaatgagcatagagtcatttggaaatatgcactgcgcttcacaaaaagaaagagtaatataatcagaaatgattatatttcagcacttcagcactattgctactattaatgtccattatcactgtattacctgaaatgtgtttaacaatcacagtcactaatcaaggtgcctgtcctggaaaatgtgtattctctccatctggatcacactatgtattgtgctgttactgttttaaatttttttcagataattggaacctgctacttcatactttgaaaagtaatgtagcgggtgaagccctgagaggttcaaagcctatgcttccatcagggaaataatgcaatttccatgcaaaatgattataatattattcagtgattacatgggggtggagggtagtctgtttttgttagacttttgaaagtggcaaattgaattccatccaagtaatcagaggttatgagtttccagcacagtgtgtttgcacttgttggaggctcatttccccagggtctctgcaagcccggagcccccggagcccccagagcccttgctgaccacttgggacagacgtgaagggccagggaattaattccccgccagcagctttcagcccatgataaatgggaggtggaggaaacactccagctgccttcgggggggataactctgagaccccctcctccctgtctcccacaggtccccagtgggtgagattggccccacttgcctgctcatttggagcaatctgtgttgacttccttcactccctcccgtccccactcccctgcctaagctttctgaaccactgttcaaacagaacactagcctcagatcctcatctaggttctgcttgacaagagaggcacacgtggcctccccactttccccttcccctttttgagggcatccaggggcctctctggatccttctttcctataacccattttgtggagggttcttggcagcacccagaagtatttgtgttttaaggcatcgtcattctgaaaaatgaaaagtctgaacatttcttatggtcaggaagttgatgggtgtaatttatttttcccacctcttctcttaattattattactccattcaagtgagacaagatgatttaatccaggctgtatttaaaatgcccataatcaatgctctcattctgagcatgtatctatgtgctcttagataatttatgtataattttaatagattcgtcaacagcagcccttcctcatctaaacaggctgcttgcagacagatcgcttaatttgcttctcaatgttatttttcatacatggttgctgcacggccgacagatagtagatgatcccattacgaacacatttgacacggcctctactgtggggatgagcaaactcgaggtctcgtactgtggcaggcagggtatggccccctctcactcagaagggtcagatcccagagaacaaagccaccaggaaggtgctgaagctagtcctggcagcgtttgggtgctgatgggagccctggcatcctgctagagcaaacaggaggctgtcagtgctgcacccattttccagccagggcatcacctgctcatgcctctcacctgctcacgcctctcacctcctgcctctctgtgtgtgagggcacctagcaggcaggctggaggtgtgggggcattcatactgcagaaacagccctctatcagcaagaggcaggaggcaatgcataaataccccggcttcctcgcctcatcgtgagacaatttcaggtgcactctgcacgactctcagagggttcccagcaggacagagccccagctggccccagcagtgaccccatggcaaaagcgtcctcagttggcttttctcctgtcctgtctcataccctagtgcttccttggatcaactcccaaagaaaccacttctgtcaaaatcttgtttcaggatcccctttaggaggagcccaaatgaagacatttgcccctctgaatttcttcacgttgatctttcaggcaccaccttcctccaggaccccgcttaagccctgctgtgaagtcgtcctactccctctggcccagaaactctcctcctctggccatcttcagtcccactagcttagttaacttagcctgcaccatcagcagccttatctgtcccctatttctgcttgtgggtgtgtgatggggcaggtgccaatcccgccaccttcccgctgactttcatgtgtgtctcagaggtgacggtgttcatctcagtcctcagtctggagtgcagacaagagacgtcgagcagggtaaaggatgggtggccagataatgccaagagtacactctttaagggaaaaaaaaatcacagagaaacgcctccttccaaagaccaatgtgagtgctgatggattacttgcaccatttccgtccgctggggtaattgcaagatgagtgcattgtgttccaaaggagaaatattctgtagatgtggtaatctttgccatgcaggctcgtgacagagagaaccacatcaacttctaaattttctcaatggagtgcaatgtgtgtaatgtgtaataaaatataaataagcctttaagaagcatctatgtgtttctttttatcaacctttagatgcgttaaagcgaagtacaattttatatgaattctagatgatatgtagtatttttatttgctacttcattgctaaatgtttcatataaaactgaagagaaaaaaatacacagtcccacatataaaagaagaagcagatggctaaatatgaccgtgggagagaagcagtgaatggtgtaggttcagaaaggaggctctcccctaccgtgtgtgggcccgagatggagaggagggaaatttgtatgtgcagttacctgtgttcattagctgtttgtttccactgtgttaaagtaggccattagtattcataagaatctacaggtatctttgttatggtttttttatcttttaaatgtacatataaagagtatgtattatttatagatgtatttggatttagaaacatcaagcttgaaaaataatgcagcaaggaatatttgatttaatgcttactagggaggggagaggaccaggactttctgcaggaaggaagactgggttgggatgttatctgacctttctgggggactttcctggaagctctttagtgacagttacagtgtagaaagatcttgggtgaaagaaaggacagtggccagagagttaggaagccccgggtctcatcccaactctcctgctgactggctgtgggacctgagcttgtcactcaccctctcctgtcactcagcctctcctgtcattcaccccctcctgtcactcaccttctcctgcctttggtgaccctgcctggatccagacatcaattcgtgccaggctgtggctccatgatgggtacctccgtgctgactgctgctcagctgctggcctcctttccagaagagcagtcagggtggtaagccatcccgcgtgtttcttcagatggatcacagagccacagtgcgatcaagccacttacctacacacattggtagagaccaggaaaacagaattagcttctcattctatttccagctcctaggctctttccatattggccaagaaaagcagagtacttacagaaattcctagttaatggcatctttctgcctgtgtatggagaaacatgcctgtctgtagtttatttttaaatgaataactcatcatatttgggtaaaaagtcctgtaatctctaaagcctttctttcacaattttttttattctgagagtgtagaaaacagcctcagatctattcaaataaaatagcttttttactgagtgaggaagcaatgcattttaagacccacttgtgttggggaaggggtttttggccactggctctgtaggcttgggctcaaaggaaaggcagaatcatgaaatagaagctgtagcagcatctgcccgaaggtcttgattttggtttaccaatcgctggctgcaggcgggatgggaacaggggctctgtgaaggctgaaattcagggagagagctggagggagcggagagtggtcgctgaccagtgtgaaaccaacccagcactcttgcacacgtgatcagcccgttggttccaccgccttctgaggaagacccctcttcattcatttgtgccctccgtgcccacttctttggcggggtggtggaagagaaggctccatctagtgtgactcccagccatccccatggcactataggtattttgttcttcaatgagcaggcatgatcattataatggttattgctgccatgtgtatgtgccatagactatgttaagtttctttcttatggtagaacattcaactctcagaacaaccatcgatgtttagtggtatcatccccattgtatagaagaggagcttgaggcagggactgggagtggagggtgggcagacgtggtcattgccatcaaacggcagagctgagatttagatgcagctccctcagattataaatcttccatgctcctgaccactacacaggctgagccagcctctgaactggtgtctccgagactaggatggaaacccaaaatgaagctcaggtggtgctgtgcagaccaggagtgaggctacaggattcagacttgggagaagatctctgcatctctgtaaggggaccagcaaatcacgaagtctaatagcccaccttgttttaccctgtgaagccattctgttcccatcattcctctttaaagctatcaagaggccatgccctaaaggggtggggcttcaagagacaccgcccccctccccgccgagcatcagcagctatatctgtggaccagactggctcattccagaccctaggagtgagctactatgctgtctgtttctcctgtccccacggccgtctccagccccccgacacctatagctttggtctggctagagggcttgtggtgttttctgatgtggctggctatttgagtgcttggggtgcaggtcacaggctcccctgaagaaccgggccaacagttccagggctgatcaccaggcaaaagacagacttcagacaagaaactggaacagggaaagccgaaggcaacacagaagccctgctctctctgggctctgcttacggcgtccagacttgaggtggcctctttcctgggtgcgagtttctgtctggtggatgctgaggacttgggatgggcctgaccaggcccctggggccctcctggaaaaccggccgggagccaagttgtctggctgtgtgttgctttcttctcatggctctcgcctatttctttgcctgttgttttgctttactccacaagactccagtcaagtcttgtttaaatgttatagcctggtcccaggagtgtcagggagagtcgaggaaagctgtgtccacactggagtcagacttttaaaggggcaatgcccctgagggcaccaaggcagcgggagtggagcctctatagatgggagtaggcgctgtgagtctctgactccccacccacatggtgacctggagggtgttggagaaaaggctactgtgtgttgctcaacacccgcacccaccgcagtccaacttgagagagctggcagctggcctgcccgtcagggaatcagggatgtgggcacctgccctgcctcatggggttcgtgtggcatctaatgagggagagaagatgcaggagcacgccacgcagcccgcagcaccaggcagaggcgaagcatccttatgaaaagctgagatttatgggtctgaaggagaagcaacatctgggaaggaattattgcaatttacagggaggatggaggcctgtttataagagcaaaatctggaagcagtgtctgatttttttttaaactggtttatattccaatcatcaacctatggtgtgaacatcttccagatgttcaaagaaaaattgtggaaaatgagttgaaccgtggaggcaatttccttttttgaacagagctttactctttactgagcatctactacgtgccaggtgggtcctccctgccgacatcttcagtgctgctgtgggtgagtcaagctttggtaggtccagttggcacctttggcttctttttcttcatcttgtggaaatgcaagggtcattccggttctgcttccagtgatgggcgaatctgtattaactggtagagtgagggtggggggatatgtgccagcattgagtggcagggctgagttgggtgagttcgagttcatttcattttgggggggtctgctgtgtatcaaaaaaaaaaaaaagattttaagaggattttggtttgcaactttttttcctgaaacctttcatgctgggtttatggtggagtcatgtcatggcataacttaggatccagtccaactatgaacacctcattttctttatcttcccattctcctcgccccaaaccatccaaggcaactaggagatgggccctttggtgctgtgctggcccaacaggaagcctccttgggtggcacgtgtgtccttattgtgatagtctccagtattttgcctggaaagtttcgtactccagagagtgcagaaagaagtgtccagggaggagttttcacgaggagaagggtgacggcagctggaggcccaggaacaaaagcctggaatgggaggcacaaaatccaggcttgctgttcaggctccctctttgacttgctgtgtgactttggacaacctttttttgccatgagcctctgttccctcatctgtaaaatgaggattacaaaagtaatcaactcataaatttgttagaacaggtaaatgagaaaataagaatgggctaggctttgtaaacttcaagccttatgaaaacattgttacctctcaaatcggtcagcctggcttctgcagacactgtctttctttgaatacagcctacaaaaagcatgccaggagctgcatccctaccagctgaaaataacggatctcatcagtggccaattgtggctccttaatggaataggcaatctctgcgttgtgctgggtggactctcatgacttactccatctttgcatcttcactctcccctttaaaaagcagtgccttccggaccccggctcatgaactgtcgtgaacctgatggataaaccttctgagaatgtttatttttgtgttggcaagaagcctgcaggctttggtgaacccacagttgatattattaatggatggatggcctgtttttctctcgtcttaaaaagaatatgaatgagcgttccccttgcaggacacactgggagcaggcgttcctgcccagggtcagaggtgccgcagagtcccatatctgggctgacaggagggtgggctcgggagccggtttcctccctacagtttacagcctccagttcctttgcttttcttttccaaggaagaaagactctttgttgcccagtttgctgaggggtgctgaacttctgggttctggacccataattggagagtgtggttacgaccctggcggggctgctttctgatgctgtgtcaaactggaggctccctaattggtttctcctctcttaaggcagtttctctcccctaaaaacatggtgtattttataaagaagtaaaaaatcctggggcccttgttcataattctcttgaccatcagtttggttcatgttaggaactatctttatttatagacttagaggtaaaatggatctcaaaatttttctctagtttcattttgaagctctccaagcatttaacccaaatagcccattcaagggtcttgctttcatattggtcttaatgccttgtcaaagtcaattaacatctcttgagtaccttgggaagctgaaagtcctaagacccctttcacaagcagtgactgactacctactgtattttttaaaataaattagagtcctctgtcctttagcttttacgatttgttttccttaagactgtaggctgccgtttgatgaaattagtggaagggaaaaggtcaatttggccaaaagtgtcacaaattaagccctgaagcaatctctttattcacctggagatagaaaaccatacctgcctccctgtgatttcctgggttcattcctgggattcattttcccaggccatgatctttggaaacgttaagattttacagtgttaacttgggaacaaaattattactaaaaattggtttctagtaatttatttttaaatcacttttaaataccatgtatctcattagagtgggacatgcttaggtgcatggatgtagcttataggcctcccagaaaggacaataatgagtcaaggatcgtttatacaccgctacatgatgggtgctatggaccagagattccaaaagatactgtctattaagcccagggtctaactgcaaggcgtgggggttgggtgggtgggaaaagaacaagaaaggaaagatgtgaaaaaataaataaaatcactgaggcatagactgatgctaaatgttaaccgagaacagttagaaaccctttcaaggaaagagtttctggttggggtcggcaaagatgtcgggaagcaggtgtgcttgccctggactttgagcaggtgatggcacttctgagatggtgatgctgagatggaggaagaggaggaggatgtcacgggttctctagttttagcactttgggaggccgaggcgggcggatcacaaggtcagaagatcaagaccatcctgaccaacatgatgaaaccctgtctctactaaaaatacaaaaattagccgggcatggcggcgtgtgcctgtagtcccagctacttgggagactgaggcaggagaattgcttgaacccgggaggcggaggctgcagtgagccaagattgcgccactgcactccagcctgggcaacagagtgagactccatctcaaaacaaaacaaaacaaaacaaaaccttgataaatatgaccattatgtgtcctggggttactcttctcgagtagtatctttgtggtattctctgtatttcctcaatttgaatgttggcctaaaaagaatgggaaacagaggttcctaggagttaaagaacttacctgctgtcacaaaactaagtgtcagtgttagaattctaattcagatgtatctgattccagggtcttgcttttaaccctctctgtgaatgtatctatcggggtcttgaaatagacatattcaaatgtgtaatttggagagagttaagtaaaatgactatccacaaagatgaataggcacagtatagagaaaccatcatagcacagtgcccccaggctgatgatgggatgaggggaattactgcctttgagcataatggtcaggggaaggagctattacaggaatccagagagagagccttgtggagctccttgttccccagctagagccatgacctgcaggtgagggacaccctgctcatgaagacgcagagagggaggggagcaggggaaccaacagtcaaccctgaccctgtccccagtctcctgctagtgcttgcatgggctgaacctaaccagaagtcagagggtccaaaacatgagggatgctctccatacaggtcaggtgagcctcccagggctcgcctgggagaggtggggaagaacagggtggggaaggtggaaggcaggtcaaaagggcccaacacaaaacatccagtacagtctataatagccaatgggtcattcacttccagaccttttcatcagcacatgaggaaaagtcccagagaactcagctgtgcatgtggtttatttttgttcagaactgtttcagttgtctcccctagaggtagggaccacagagatggaagggcaaggccactgtcgtcaggacaggcgtagacagcctgtgcttccttcccaccactgtccctctaggctacagtctagcctattccatattcattcggcacagcctggaaaggaagtggattaacccgacatgaactctgagggttttggctcaagaaattgggagccacttctaaagatggtggctgggatctttgggctctcaagttagtagacttcacagtagcctacagggccctacgcaatcaggatgctcaccactctggcctcacctcttactagaatctccctccaccagccacagtggcttccttggtggtcctggaacataccagccatgttctcactggctgttccctctgcctagaacacttagggccagatgcccacacgacctactcctcatcttgaagtgtgtgctcaaatgtcctccactcacaagactggccctgcccaccctacttaaactgcaccacaggccccccgacaacatgcaccctaccctgctccatttcttctctaataaattgcatatactaccttccaaaatatgatacaattttcactactttttaagtgtattgtatattctgtgtttccaccctctagaatatgagctccctgagggcaggagtacctttctcttttgttcactcatgtattcccagtgccttgaacatactgcctgacacatagagggaatcaatatttattaaatgaatgaatgaatgaatgagattctcaagcacctaaaaatggtttgacccctatctcctagacctctctgttcaccagcacttatctgccaaggatctttcccagaatacatcgatcaccagtattgccaataccttgtggtcaaagtgatcagtttctccttgtgcttcaccttggagaggaaatgtactcgccactttggttctgtgtcaaaattaaatggcgaccttggctgattttgcttccccgcagaggttatttcttagtcgtaaagagaacattctatccttgagaaaaataatatttttgccaccttcagcttgaaaatggctatttgatatggatcacgtgcatctctatcagcggccgctggaaaagcttaggttgagaggatctgagaaagactcgttgcgttgtcagagggaagctgaccataaggcagaatgagtttacaataacttatttacctgtccaaatccttcatatcacattaaagctttcccctgctacccgggactctggagtgctaagaggaaaaaggaaaatcaattgataatgatatatttggtttaaaaaaatatattgattcccaggtaatgacagtcgtgcgttttgcagtgggggatgccatttcccgttgtgaagatggctttctcatagattacatttaaaagaaggaaccaggagtagctctgcctccccgtaatagatagcctctttctcctaggtattaaatctataatttaaaaaaaaaaaaaaattctccccagggaacctattctttgcctcctcaaggtcttcttgcccattgtgtgaaaaaagtaatgatttgtttttgtaattctagagtttgtgtccttttcagtattagattaaagacttaaatgttttctttttccccattgctggagtttcttagtttggattagatggaagacaataccattgttctctctgttattcagtgtcaatggctcaatggtggggattagggctgtgtgtattcggaggatgggcgggggatgcctcatatctgccactcggagtactctgctacccacttcgccccactttgcatgtgctggcagagtttgtgcacagcctgtgtgagataatccacagtatgcaactcagcatcagggatatctgaggcagagactagcatccagttagtgtggggaccacccaggatgctggaattcaaaagacatctttttgcaaaaaaaaaaaaagaaaagaaaaaaaattagaccttttccccacccctaccccactgtttttccctctctttctagactatctggcttcctggtgatgctcacgctttgctaagtgttggcggccatcgtggttttcgcatcctggggacgaatcctgagcttgccagagacgggcggcgcaaggtaggtctctgcttagctcacctggaaataagaaaggcatcagacctgagcatagccagctctctcctctcatgctaaatgtgtgggggaagggaagaaagtacagtaggtcccctcgccctcttcctcagtgcgattttaccacaggcgtgtgtgatcaactggtactggggcttagctaagccattttagcctcaatcctcctagaatcaaccaaagagaatatctatgactctttttgttgttgtccagcccaggctggagcgcagtggcgcaatcttggctcactgcaacctctgcctctgggttcaagcgatccttccacctcagcctcccaagtagctgggactacaggcatgtgctatcacgactggctatcacgtgtgctatcacgacatggtttcaccatgttggccaggctggtctccaactcctgacctcaagtgatctacccgcttcagcctcccaaagcgctgcgattgtaggcgtgagccaccgtgccccatcagagaatctctgtgacagttccttgcttacctgggtcttggctttccccaggaggttagatctagggatggccagcaactagatgacctttaacctccttaaaaactgtaattaagttttataattaagttttggtattaaaatgtattattaaatatcatgaaaatattatttattcattataaagggattttaaaggatagtagctaaaagtatataaatgacttataatcctgttccccagagataaccattttagtgtttctttccaagctttttcttatgcacatacgtaaacagtgcacacaggatctgactgtgggtactgttcggggggcatgttatttagattccacaatgtatcaagccatttcgtatgtcggtaaatagaaatctatatcaccatttttacagactgtctactctgtggatataatagcatacatgattcacttaatgccctaacgatggacatttagcatattttaaatatttcactattacaaataacagcacaacaaacattgttgcatatgtatctgcatagtcatttgattacttctttggcttaaatttttagagtcctagcttaaacttttgactccaggttctccaagcaggatcaggcagccagaaatgccggggaacctggcctgccttgggagggcacaatcttatgaacagaatccgtgatctgggatctgctttagcccccaccaggcaggccaggaatgtgcctgcagaggcaaggaggcctggagctggagttgacaacgttcaccacatttcatgctactgaagggacaggagctgggcctggaatgaagcaggctggagggcagaggagtgggctctcggatccaggacagtggaggcccagctggcccagccttgtatgtccttgtgggacttgagcctttagaagtacaggctgcgtctgcataacacacagggcctagtgctgggtgagcacaggccatagcagccccgggactgctgtattctcagccgcccaccctcatgccttctgaccggtggcctcctggcctctgccttggaccaaactccagcttccctctgcagcaggggcagaacatcagaccaacaaggctcctgccacgtccagattctctgctggtcagagagctttctctttggactcagagacattgaggttggggatggctgtcccctgccagaacccttgcacagagaggagaaaatatggctttggaatctcaggctaggcgcagccttggttgtcagcaggaagcgggagaaggctctgggctgggccaggatcagccactgaaatggaaggttccccaccctgtgaccccacagtgcatccagccttcagcctcccagcagcccagtgggggcagccagaggagaggtgggttcttgacctagggagctggtgggctgttggcacacgcccatggcaccactggtgggcgacagctgtccttgctagcgatatcgccggcactggggaatcctttgcctccaggcctcctgttgggtcagagaaggggagttggaaaacaagacagcgcagcgtcagtttggcagccatggcatccccgctcctacacggggcaaagaaaagattgaggacgtattcttcacagaagccagctctccttggatgcacctgtgagtttggcaagagtgaagggaacagagacaccccagggcagtgggttttggtttcttcaatgttgacccttagtttggggtctaatcttccctgctgctgatgcagggtggcacatggctcttgttctcttgttcgtcctgagctctggcaatcatgtactttaggatggggagggactttgagggcagtttcaccaggcatagctggtcagatgcaccctatgtgggcctctatctctgtgcccccagaccagggtccctgttgtgaactcaagtctgtcttccctagcactcggccagttcctggaggatgggaatcatacctgatctgtctctgtgttccgctccctctgccactcataccagtacctgatgagctctcagtaaacaaatcactacgtgcagctgggactgtgcctgggagtgtccgcaacatgcagcctggtgctggctgtgccctcccctcacatgcaggagtcccattgatttccaagatgataggaaggttccgaggcccctagatggttctgtgacccctggggatcagtggaagcagctatcagtttactgtggaaactgggccagctcacagggtcctgtgtaacctgctacaaaacaggccagttcaagagccatgtgtggagggctgcgctctgcttttctgtggtttggtggaaatcacccaaataagtaagaaggccatactggaaccagctaggaggagtgaaatctgatacctgcactgcaggaaagaggggtggggggagttgagccgaggactcagtttgcgcagagcccaaggctgagccaagaatggcattagcagacacctcgggctctggaggtggtgaagggcagtgctgatcgtcactggtgctggagccaccctgggcagcatcccctgcctccatcattgaggccgtctcagtactgtctgtccaggccgtttgtccccctgccctcagcaaacgaaatgccctagatgccgcctgtgtcttcggaggaggttgcaaatgtctccagagctaacggcagttagagaacaccatgggccatgtcctgggcttccacaccccccgcctttacttcccccagtccatcctgcaggcgtcctctctgaccgcactcccctgcccgctgcctgccttccctccctcgtgccatggacagccttacttcctgagctctccccttgtccactcccctcttggcctccgtggtgtccacctcaaggagggacctgcaggcagacatctcactgctgctccggccgacacagacactctgctgcccccttgtcttctgactgtacctgctttccctggcccactctggggacctctgcagccccttcttcaaataggtatgtgggcgctcacacccctgaaaaggccgtgtgaccacacccactagctggggcccagatccctcaacagaacctcagccgaaccctcagccctacacaggcatcatttgggattctggtccgttccctgcctggtgccctgcagctgctccgcacctttccatcaacagggctgcagacccccagcctgcgctgtccacctcggtgtcagcaagtggcctctcctcctgcttcctgtccatcttgctcgtgtgagctgccgtcctccagctccaccgcctcctcctgccaggaagggaagctgttggtgccgcaggctttccttggctccctgtatccccagccctccctccactccctctgcttcagctgttcccagacttgactcccagatggcacctctgtcctaaggtccggaccatttctccagtggctcatgcgtagcagatccctgctgtctgattcacatatcagactctacctgtccaaaacaaagctgcttccttgctctccaaggaagccttgtactcgtactgtctcagtcctcctccctccctcccttagccatgcatctccttctcctttgccttaggctgctcaccttccttcctggaccctgagctcactgaggacagggatcatcctcttttctctacaagcccggcacagggccctgttcatgcatatctcttgggattagattattttattcagttcagagattacagaaccaccgacagtgtgtcctcataagcagcgtggtggcagggaacctgggattggaggcaagctctggattctagtcccaaatctacctctaactctgggaaagccctataaaaccttctgagcctcagtcttctgagctgtaaaacgggaataaccacggccttcccatttctcaggaccttgaaaggtgacaagggaggaacggtgccaccagggccagcagttcttagcccttggtgcacattgaccggagtgctttaagaattacagatggcccggccgtggtggctcacgcctgtaatcccagcactttgggaggccgaggtgggcggatcacttgaggccaggagttcaggaccagcctggccaacatggtgaaaccccatctctactataaataaaaaaattagccgggcatggtgacacacgcctatagtcccaggtactcgggaggctgaggcaggagagttgcttgaaagtgggaggtggaggttgcagtgagctgagatcgcaccactgcaccactccaccctaggtgacagcggaagattctgtctcaaaaaaaaacaaaaaaaaactacagatgcctaggtccttcccccagatattctaattgctgtcatgaggatatcagtgtgttttaaaactttaaccactactttcaactcataggtgttattaccaagttcctgaattctatggcttgaggaactgagatgggagttataaagagtttgcaaaacaatattcctggatgatgtgtaatttgtctcatctttcagttcctttaaaatctaccccctggatcaagccatccaaaagctgggtaccttggctatgttgtactatgttcatcttgcgccaccccacatgaactctacgggctgttagaatatctgctgccctccatccaggtcacaacagtgcaccctcgtttaggattctgtggcagttcatgtttatcctgtcacttgtgactcctttgctaggacccttgggagaggtgtctctgattccaccacagacatattcttctcccgagccactgtcataggatctcatggacccacaaatcatgttgtaacagatttgcctcttccatgctctcgaaacggtaactctcaactctggctgcctatgacatcacccagggagattttttaaattctcatacccaggctacataccagatctgtgagatcacagtcagtctctgggaggtggatccaggcatctggatttttgtaaagctccccaggtggttctgatgggtgtggccaaggtcagaagcactgccaagcctggaggcagatttgtggcccacctgtagcctgtgtatggcattttctaaatacggtttcatgtaggcaacattccctcctccgtttcctgctcctacacttgtgattctctctcctacttttgatttatggtgtcttaatgtatccttttaagtcccctgcaatcctttctggaacttagcaaagtgaaaacaaatagagtagaaaggttcctgcttttctctggctgggatctgggcacagctcccaccccagtcagccctcgctggaaagagggtaggagcctcctgtttccccagccacagtagctggtcagcagcctcgttctgtaaccccacaatgggtaattgtagctagttctgccaagagccctccaagatcccgtagaagaggctggtttgggctgagagcggtggctgacgcctgtaatcccagcactttgagaggccgaggcaggcagatcatccgaggtcaggagttcgagaccagcctgactgacatggcgaaacgctgtctctactagaaaatacaaaaatcagccgggcgtggtggcacatgcttgtaatcccaactgttcgggaggctgaggcaggagaattgcttgaacccgggaggcagaggttgcagtgagctgagatcacaccactgcactgcaatctgggtgacaggttaaaaaaaaaaaagaagaagaggctggtttggttcacagcatctgagtgctgagactgggctggggggagatcagagatggctaacgatggtcaccaaagcgccacccagttcaggattgtggaaggccatgccccccttttccatcttccttgtccgctgccctcagtcccatgctaaacagcaggcggagattgtcaacaaaaggctggagatgcccagggatggactctttccccagtcctgaaagccagggagctgaggatagcatgcacatgggcagtttctcttagtgaatggcgggtgagatggaggggcgcacagccgtccagtctagctacagaaccttgtttggcacctgggctagaaatagcttctccacaaacctcagagtttatttttacggcaaaatttgattttctaagaggcctgtctccttgcttacctcgcacctgctcaggtggctgcggctgccaggaacagtggtgagtttgtgtcctccgtgagggcacctggccaaggagacatgggtgctgacccccagcctgtgctctgggagtgtcgctgtgcccttgagagttcagagagaggagtgcctctttctaacttgcacaaaagcatccatcggggaaagcaccatgtgtgcatcctgctcagggaaagcactgtgtgtgcatacattgagtgaccatgctctgaaattgatggacttctctcctgtagggatgatctcatttactcatactcagaggccactcagaaagacttttaagcttttgttttctaatcataaatttctcctctctccctccaactccacccctgtctctctctcttacaacaggacaaatagtgccaggagtactggggactacaggatgaatacccagcacatggtgaaacagaagagtgttgcaacgctcactcattcattcattcattcattcattcattcattcattcattcatccatcacttactggtagtcacattgtacattgtcctaggtctgggatccagagaggtcagactttcgccctgcctgcaaggagctctcagtccggtggggcagccagtacatacgaattcttacatgattaacgcgatcaattcttatgtggcaaatatgtgataaatgcagcaaaaagaatgtataccaagtgctatggaagagcaactcatttacttgacttagtgagcatctactataatgctaggcattgttgtaggcaccgggggtatcacagtgaccatatgagataaaaacccctgacccagagcacacacttgagggggtgagaatattcagcaactagcttagtttgatcaaaaccataggcttcaaagaagaggtgagttaaagctggaaattgaaacctatgcatttatatgtgtgtgtgcagggaacactaggcaatgggaacagcttgtgtaaaagcctgaagatataaaaagaccaaagatatcagagcaaaaatgctaagggaaacctaagaattgggagacacagccttgaatgccatgctaaccctcccaaggtcactgtctcatataatggggatgtagctgaaagctcacagggcattggccagagccaccctcacagctaggttccatgtggactccctgaccccaaaacagagactccttggcaactcccactccaactccaatttgttggaacctctaaggctaaagatagacgatttatgttacctccttctgtgacctagtgcttttaggttgcaaagtgttttcatagcttcctctcctggatcatgagagggactctaggaggtagacaaaaaggggttcttgttgccatttattgtaccaaggagcaaaccaaagcccagagaggtctagtatcttgctcaaggtcacacagcccatcaggcagagcagaaactagagtccttgtgtcctggttcctaatacaacccaggggcccttcttgttcccatgtcagctgccactccttattttgaagcctaaaaagctctcagcaagtatcaatcacatgcctgcctgcctcccacgaccattagtgcagcacatacgacgtgtcaagccaggcattgaccatctgctgggctgcaatgtggtcccaacccccactcaggaagagaactgaaggagtcacgtatgggctgcccttcttcccacccaccatgacccaagaggcctaaagaccatgagtcaaccagacccaggctgtcaccctcctgagccaagtggaacaggtcacagaatgaccatcgcaggctggagacccctccacttgctcctagaccacctggaggccattcatgacagccgccaatacctattttcaccctttcttgtaatcaggctggttgtgaagagaatggggagatttcagcctcacacacagagcccgagctcacctgtggaagacagacgtagcctagcagtcctcacgggccacccttgatgtgttgcaactcatttagataaaagtgtctggctcgtaaggtagcagcaacagcaaaaatcattagaagcacatttctgcttttacaaagtaacctagtaacagcacaggaggcaacaattaacccggcactccgttctctaggtacacaggcaggtgctgaaagtggaaaacggaagtcagaacacagagacattctgtccaggcccttctgggatcagcactctgggatgtgggatggccccgccagccagagagccacacccctgccattagcacagagaggaggtgtcctccctctccatctcagaacagtgtgattatttatttagcaccagttcaaggctttctgaaatgcattcgcggtgctctgccatcttgcgcaggtcctccctgaactaccactgctgcctctgtggatcagataaaggaaatctggcctgcaccagtctctgctgggctcttgctcccatctctgcagactcctgttctccctgacctacctgagtgttcatatcccaccttggggcacttggtcccgctgagcaagtcttccagaagcgcctctcccatccctacctatctcctggcaaagagctccagggccgcccccgagggaattctctctcctctgatgccattatgccatttctctccctggcacccttgtagtacttgctgcttcctggttccggtgtggtcctgtcactgtccagtatgcccaaggctcattcccacccccagtactgagggcagcctgcagagccaaacaccctacacaggctgaaaaggaattgatgaatggaaaaagtcagttcccacggcctctggctgtgctcctggcccctcagccccacgtcctcagatcccagaactctctcaggagactaccgggagtctttggtggcagggactgtctcagtcagtgtgtctcagtcacaaagcctggcacaaagaaggctctcaaatgtttctgagataaatgaatgatctaaagtggctcctttaacctgtctaaattgtgtgtgaaaggagccagccacacccatcaaggcagctaacagctgcccatgttagggcagagggtgacgcactgaccctgctctcccaaggccaccacccctggggacatggtgcacccagccagagccctccttcccactgttccaagcatagtccatggcccaggaggaagctaggcctcccagatcttgctagaacccaggctctcagtatgctcaacattgcattcaagccatgtttagaaaggtatgttccatattcagagggtcctcacggcctttgttcattcattcaggcaacagcaagcagcagaaagtaaatggtcacaagcacagctgctagactgctttggtcctaaccccagccctgcccctttccagctgtgcaacctctgggcacagtccttaacctccctgtgcctcagtttcttcatgtgcaaaatagagattttcataaaattttctggtggttgtaaggactaaatgagttaacataataaagtgcctagaatagtgcgtaagacatgtacaaggctttgctcttattattctaaaagactaggacctggctgagtcatggacttaattcataccttctttgagcccaaatgcatcttcaaggaaggtgtcggcatgcccacctcccaccctcacctgtcagtcatcctgcagccttcgcttgctgaatgcatccagtcgtaggggatgtctgtctgttcccagagaggtggccctccttggcccaccagatcccagacagccactgggctgcatcctattccagttctccataggccacagcagagggtcctggggcccctcccacttacttctggtagggaatctgcaagcacctatcacagccccatttcatttagcccctcaccccatgaaaagggtctgaactcctgatcagcacacagtgtccagcagcccaaacctggacagtgatgaatgggccatccgagatgctggggcttatccctcccacgattgccactgacaggctttgagacccagaagcatgtccgtgcccctctttggatcttgttgtttttatctgcatcatgaggggactggatttatgatcgatccccaaggaccagtcaggctctgtccctagaagtgacgctctggatggggccatgtgggggcttctgggactccaccacaattagcactgtggcctcagaagttatgtcagcatgtccttggggcatctgtcattaacaattatgaagtcattttctggtaaataattcataacccgagagatgggataagctgccaataaacaataatccatttagaatgaggcttgatgagggcgagcacagctgcggaattgcagccacctcctggagggcagctccctgctcacctctggtgtcaacagggcccatccttagggccctgctcaggccacacctcctccctgaagccctccttcaccactcctgaccaaaggcatcacccctcccctgagctcaggcatgactgagtctgtgaacccagtgagggctggccaagtgcccaaggctgtgctaagcaacttgcatgcactttctcgtggaatcctcccagtggccttagggctgtagctactgttgttatctcctgtaccgagaagtaaactgaggtttagagactaaataacttatccaaggtcgctgaactagaaagcccaggtctggagttcacatctgtatgatgtgagagctctcactcttagccagggtgtcccactccctcgtgcgagcagctgtacctcttgtcatttgtccaggctttatttgtgtgtgacctttgtctctccagcaagactatgagccctagatgggtcccaggaggtacttcctagaggccatagagcagagcgtctccttgctggctggctacttaatgttgtagtgaggcttctagtggtgtttggaggccaaaccaaggacgctggagagaggggcaggaggggacgtcttctgcacatgctacctgaatttccatcttctaataggcctattgcatttttcctgcccaagggacactttgcagcctctggctataccccctggaagtactccgtcctggggaagaagttctttgctcagattctgggaaccctggctgcatgggttggtcattaggactgggttagctctgccaagagctcctcctctcctgccatgccatcacctgccatcaaggccagcagcccaccctgtatcatctgcaggacttgcccccagtgcccaaggctagaaggggtcctcaggggtgtcccactccccctgctaaaaggctgcattcttttttctcctgggtaggggcactgcagacattgttggcccctgtattataaccagcctttcaaggcccatagtcatgaaggtccctgttttttcttctcagggaaaaacagaactgccctgagttgcaagtgtcaaggaacagggtggagtttctagatgttgaacctgtaattgtcacacatctggaatgttgcacaaacctctgcagctgggccgtgtggtgggagaagccacagtggctcggtgcatgctcattcctcaataaccacagtaaccagcccgaggggaggccccttctagccttttaacctcctacggccagtgatgtggtcaggactggcagatgcgtggcaagacaatgggtcacttgctgctttctagaacagcttcaaacagctggaatcttcccatctcctttgaacagaattgcctcacgggaggcactggccccgtcttatttgtcaggtgggcttcgcaataacacacctcctgcccctggcctgagctccttgctttcaggattggggaaagattccacccctgggcgcccctggccttttgctgacaatctccacctgctattcagcatggggctgaggagtagacatggaaggcagagaggggggcccagctactgccagcctggactggatgatgctctggcagccgtctctgggcatcccccgtctcccgctcagtctcgtctcagcactcagatgctgggaaccagaccagcctctactatggggccttggagggctcttggcagaactggctacaattccccattgcgggattacagaatgagaccgtgacccagctcctgtgtctggggaaggagaggcctgatgggtgggagctgtgcccagatccgagccagagaaaagcagaaaggttttctattttctctattctacttgttttcacctcattgagttccaggaagaattgcaggagacttaaaaggacacattaagacatcatgaatcaaaaggaggagacagaatcacaagtgtaggagcagggagtgtcgcctacacaaaaccacatctagaaagtcccacagatgggccacaagtgggccacacattttcctccaggcttggcagtgcctctgaccttggctgttcattggaattgcctgggcattctggtgactaatgcaaagccatctacctcttgcttacccccaaagaagaagggaccacatcctaaatctgtattaagggtcttgcttttattctcggacttggccggtcccagggaggttgggatgctctcgcttctggggtggctactacagcccatcaggacaggactttgcatgccctggttgtggacagattgacagaaaataaaagtattgtttagggaagggaggggtagtttccaaccccagcaataaaggaatgagagaaactggtgtttatcacaaagcagagaacatggcgtttccgtgggctctaacaatgtgacatcctcaaggaaggatgggtctgtgactgtgggtccacttggaaggtgccctcctgttccccagcggggtgctgagtgatgtgctgggaggaagggcctacccgcgagcctggttggtccttctacagaaagccctggggatggattgtctctgacactaaagcctcttcccaaaggtctccagggaaagaaattccatcagcttccagagtccctattccggtggctcctgcaggcttttcttctatctgacctgaatctcccttgctgcaatttaagcccattttcccttgttttgttttgagtggaaatggagaagagcttgtccccagctgcctccgaaagcagggtgagtcagaagtccttgcgtacctcctgccacgctgaagtcattctcagaaacctgcgctattgaatctgtcctcatgaaagcctcccaagagaaccagcttcgcattaatgcatgaaacaaggctccactctgggatgggggcatggtggtggcaaggcccttcctgcagggacggcactagatggccccgagtgaatgtgcctggcccctgcaacagctggggagaggggcatgtgaacggatcagcacctcacagtgaaacttgcatgcgtggagtctggtcagggagctgggtggggtgggcggtacccacaccaaggaggaggtgcccacatcaggtcctaagggagaggaggaggtggctggggaaagaggaagtcctctcaggcgggtaccaggagactccttgtccactctaggttccacatttgcgtttgaaaaaacagtcttcttatctatactccccttgctctagtgttggcaatggattgtttccccgcctgcctcagctgatgttgaatggaaagatcattcacttatttcatgagtgcgcactgggggagcctccgtgggcgaggatgcgcgtgcaggcgcatacattctctggaggattcttttggcctcttgatctcccagaccactaggtttctgtcttgtttttgtgcctttttacttctgggaacaaaaaacccccacttgtttctgctaaagataagctattttgtaggccattgaagccaattcctggaagagttgggttggtggttaaaaaaaaaaaatctgattggaaagcagtagatcacagcagctaagtgactgagtttaaaaagcaatgatgctgagtggtcctgacaacactcggacagcacacagtgaatacaagagaagaatttttatatttcctaggctagtggaattaaaaccttcctactctgcaggataaatggagagaaacagaatctctttttcctaagcagttatctaagtgtgatacttagatgtgagcaaggtaattaggctttgtttttttccgctgcttggtcaaaagcccccttctcaaactacttggctccaataccatgggggaaaaaacccacctacattgattggatttaaataatggaattgccattaatatctttcataaaagatgattgatttctgactttggatttatggaaagttggggcttgtaaaagtgttcagagtggcagtcattcagtattaatgctggttcatacccttccctcctcagggctggttacatggatggctcccaacctaaacccccccatgccagctgctaggtcacagggatctctggagggtgtaacgggcagccctgggcccatccagttgccagctgtggtggtccaggaggctgggctgaaccctagccctctttccttctttacatcagatttttttttacctaatatgatttttttttattttactttaagttctgggatgcatgtgcagaacatgcaggtttgttacacaggtatacatgtgccatggtggtttgctgcacctatcaacccatcatctaggttttaagccctgcatgcgttaggtatatgtcctaatgctctccctcccctttcccccaactctatatcagattctagtatgaaactcagtgctccagcccctagggacaccagcagcttccacctgtgctctgtggaagctcactgcccctcataggatggaggaccactgatgacccagagaggccctctgcaggtgggtgggtatgtgaatgacacagcctctgagctctgctctcctaccctgggagctcagatggactggcctttagtacagggacctgcgcgaatgtggtctggtggttcagtatgagttcctgtagtgatggctttctcctgcttgggaaaaggcagagggaaggcctaggcacaccagcaaaccagtagcagggccctgtgtggcttcagatgcctggggggctgaggggtatgaatcaggtctcagggcttatagctcccatgcatgcaagccttcccccgctgggccagcagctctgctctgctcctgctcctcttgccctcaggtagctgcccctttcatccctgtcccagcagtgggaatcccatatcactgtcttccagccctccgggtgctactgatctcctgttctcagctctgtgctggagcctcccagatccatccctagggattggtcctgttgacatggctgtccactgcccctccctccagatgccgctcaggtgccgtgcgacctcgctgaactccatgttccctcaagctacctcctcctcccatgtcccccacctctggaaatggcaacaccatctgcccagtcccctagttagaaacctgagagtgcatctcgcctccacgtactacaggctgtcagctctgcctcctaaccatccctcccactcgtccttcccctccatccccactgctcttgacttccttcagcagaccctcaccaactggcacctgagcaaccaccatgggctccctgcctccacctttttccctccagttcctctggtacactggccccagcgggagctctaggatgcagatcacacgtccagcctccccagaccctggaggccaagttccagacacctgtgctgaaagcataccacccacgatcacactctgagacctcgtgccactgtgcctcttccacatggtctcctccacctgggatgctattcccatgggcctctctggactggcccccttgacctcctcccaaggctgaatcaaccattcctccttgcacactgttcatgcctctagtgcagaaggggaaattaacctgtgagggcctgatctgttagaccggtttggggctgctggtcttcttcacccccgcttctgaaaacccctgcacccacccccagcccttgctgtttgatagcagtcacgtggcccaccctccagcctcagcttattggacgaggggcagatacctggcttcaggctactcttccattggctggcagcaacacaggcctggtgggccgtgactttaagaaattagctggagcatcagattaaatctcctttgcaatgggaagtaagggaattaagaaccagagagttccatctggggctgggtcctttagcctgatgcttatatgaatataagaaaagcatgatttttctgaggctctgtgcaaaacagagttgagtctcaaaggctggttgggaaggaaggaaaaagagaggtgatatccttagagaaggggtttgcagagcaagacagacagagctagtcctggctggtcccgaacctcctcttttttttgcccatcggctgggttccttgaaggccctccttaccgtagcctcacgatactacgatgcagcccacaggaaaggcacgggtgtctgagcccaaaagccagaactcaagtcctgcctctctccgttgcagctgtataaccttgggcaaattactttcatctctccctcatctgcaacagtggaaatattccaggatctaatgggcagttggacgagatgatgttcaagctccgttcctgctctaacatctcacagccctgtcgtctttgccctgcctcccgcacaggaatgacgtaaggtagagcacttcacaagcctggccagctcagtgtttgccccaacctgttcttgcaaatagcattgccctttcctgttagcacagctcccagggggcctctgggagcttttgcttctctgcttgctgtttaagagggatttatgccgtggccaggcaggccaggatgttcatgcacccccaatagcagctttatctaatgaggatgagatgcttacacatattttcattttttaaaaaatcggctattaatttgtcagaattattcatattttactgatgatattttccatgtatctaatcagggagctcatgaatagaaatgaaactatttaaatacagagatggtgtacattgtacgatcttgttttctcaagctgtttcataaagcagtgaatacatttatttcttctaaaaacaggttttgcaatcatcaaaaacttttttaaatctttgattaaatatgactctattcgaatatgctaaatctctgggagcggggtgggcgtgtgtgtgtgagtgtgtgtgtgtgcgcgcatgtgtgtgcatgtgtatgtgtgtgtgcatgtttatgcgtgtgtgtctgtgtctgtgtgtccgtgtggtcacttgaacaagtacattgttttccggccttctccatagggacaggagactttttcttttagtgagaaaaatggaaaacacattctgggtcaaatatttaggatggatagatggcaaagtaaaagcacaaattgaaatcgagctgagtaatattggagataattatttgtacagtgtagacttttaaactgctcaaaattccagcagcacttacctacactgaaagaggtttagaatcattaaacaaagccagatattaaatatactactgctatctctcgaaacattagcaagtaatgtaaaacacatggcatctactcaatggaaaatctgagaatacaaattataatagttgtcgtataagacctctgggaagcttgaactaaattgcttaattccattaataacaaactattactctagctattaaagtaacataaggtaatagagatcatgtcgagagattgtactgaggctctttcttcacctagcacaaatttattcaggggcattgatagattttaattgactatggcaactgaatagcaacaaaggaaattgaatgtcttttgaaaagctccacgttttgtagaagcaaatagcaacaccaaaatgaaggtctgggaagctgggtcaggcagggaagggtgctgggaacatttccaccagcagctcctccacggagatgctttcctgtgaccttaaggaaacgcttcctgggaacaggcacgccacaggcctgagcatctttttcagctgcatgcagtccaagtggaaaggcaaccaatccaggctgctctaaaagcacgtgctttgtcgtgaatatccatcaggcacgtttccaagatataggactgcagggaccttcatgcaaactgccgaagcctctctggagagttctgagaacaggatttgttttggcccaaaggcttggcaatggcatgagtgaccccaaacccccaatcatgattctggggctgaggatcatgaaagaccccctcggcttccatctggtccaggatggattctggtgaccgtcacctagttttctctcccacttcttggtcctctccctgctttccgggctccttctgtcttctttccacacacccagttgccatcagcgtatctgtcgtgcagctcacactggccttgcactattgcagtatcctggtcttgatgaagcgacagtgctcctttcgtcgccgtaagccaatctctccttcccactcacccagccccaagcacctgggccttcagtgctgcctcagtgcctctgttggaaggaaatctcttttattttatttatttctgtgagtattttatttattttttggagacggagtcttgaactcctggcctcaagcaattttctcgaactcctggcctcaagcaattttcacatctcagtctcccagagtgctgggatcacaggcgtgcatcactgtacctggctggaaaccccatttttaagggaaatggtaaaagatgtgagggcctgcaggaggtggtccctgtagtgacgttctaggaggtgcctctgtgggctgtcaggcaggtggcagggaagtcaatggagccccccaatcctggtgcccatgccatgctttttggtgaggtgggtccaggtcattgcccctacctggctctgggacacatgataattttgcagcagaggtgttgaggttgtgtcttctgatgtttggctggacattcccatttgttttcatgaatgtctgaaatgtcatctcacttaaaccagtacaatactctttatcttctgccctgggtggcagtgggtataacagtcaaccctgccatgtcccctgggactcgggacattctcccagcccccattggtcccagcttctctccaggacatcacagaggagctttggggtcaagcctgcaccgtacccacctccactgtacccacagctccagcgagagtgacggcccctcctggcatcgtgtcagggccagggctccgggggttgacaccccagaacaggctccggctcatggctgtggacgcctaccttgttggcactgggagagtctaatcccgccacgactgtagcacgcgcatgtgtttgaaaacctccttggcaggcaggacctcctaattttttccacttcttgtgattagcgttgcagactaatcctagcaccagactcaacaccagctgttcttcccccactgcttgtttttacttacgaaccaaatcctggagttgctgccgaattggccagcgccgctctgctcctccctcagcccgagctgcagccagtcacctatggcatgacctcagatgaactgtcttttcaacatggccacccgtgtgtccttcacagtgcccggacggcactgctcagtctcagggggcacgagaggggctcactgggttccaaagaggactccggcttacccgctgcagcagtgggatatcagctgttcctggagccaaactgatcttagaaatttggttttgcatccttagacacgagacagccctggataccacttataattttttatgtaatatggtattttcagaataagatatgtaacatttagataagttgtatgacaacaatgaaatgaacacacatgatccatcccacctctgaacttaagagctgaaacatcaccagactattgaaactgcctgttttcctgctccattcattccaggtcctcttaaatttggaaaggggtatgcagaaagagcacagccctggtacctcctccctctcccccatcctgctcccaccggaaagatatgttttcccccaaaaagggtaccccgccagtgtgcagcagcagcaccccctctaaccttcagcggggccagcggtggagggaggggaggcagtgcagcctgggcaggaagcaaggcctcagtggcctccagatttgcaagaggggccagagctgccctagggggcccagggaccaccgctgtctctgctttggaaatttctctggcatgcttcctcttcccctgacttctgtggcaatgcttgggggaaagttatttactgaatgcagacccagggactcagacttctgcatccatacataccatccatttgcatttctgtgagagtctctcacatacctggaaggccctaaaaacaaatcagggagtgtggcatatgggacatttgccctccaaacactgcagcgtcaagaagaattgcaattgtcagaaatatcatattcctgtcaaaagcgcatgaaatcaattctgtaaattgagaaacataagtcacagttatatttgttctgcaaccatataagaatcacgagtttctcctagggtaggaaaaaaaaaaaaaactatgagccctttagaatgacttaatgtccaatcatagccacctttaccaggcagtgctgtttctgttggcatgagatttctgactgccttcagtcggtgggtatttccgctgggttggttgctttcttggcaactgcgattacttgaaaacgggatgaaagtaagtgactccttttttgttttcctccttggcaatctctctgtggttttgtggctgcccatgtggttctctttccttcctctgtccctccatgactagagcaccacagcagggagccgagggtttcctggggttgggcagtcactcagcccctccctctagcagtgcacgtgctctggagttccacatacctggaccctgttaccccgttttagttgcacaggactgctgggggagacggtgcaataatcatttggtcaagatgagccaagcctcctttgggccgagcacggagatcacagaaatggactccaactcacctccacccagagaggcagggccaagcctaaaagttttgtagggatttagggaagggagggagcaaagggctgggagagccagggaaggttcattagcccaggagcatctttccctgcctcctaaaggaatatagccttaagctctttggaggagaggggaatattccagctgggccaagagagagggtggcctgaggctggtgcgtgcatgtgacctgaggggcactgagctgtgagctggaggtgtcgagtgggcctcagcactgaagtcaggggaaaccaaccgtatggatgccgttctgaaagacagcctgtattacaggagcaccgggtagaaagtattcaaggagacagagatctgtctggaactacgggaagggctgactcaagatttctggccagaatcctaggatttttcttttttaatttaaggtgtgcagcacaatgttttgataaacttatagatagtgaaatggttattatagttaagtgacttaacatatccatcatctcacctagttacccttttctgtgtgtgaaaaaagcaccaaaatctactcttagcaaacttccagcatacaatataatattatcctatacactgacagtgaacaccatcctattcatatattgggcagggtaggtttgtttgttttggatgtagaactcatcaccaggaaagcaggcaagaattccccgaaaatcaagaagtctgagatatgagcagcagtaaatctgttttctctgaagtgccagtgtagactccattctgctgtctctaccttggcctccataccgagtgggctggaggctgcggcaccagtgaggtgccctgacatccagctggctgtgacaaatcagaacaaacacccgatcaggcaggagactactacctgggggcctcgccctgccctccctgccaagcagggagctccaggcctttggggccaaaggaagcccctctgctgaggctcaggaaggttttcggggttggggagcagactggaagaacttagtcctgccctgaccaacacccagctttctcagcgccttcgttaggacatttaggaaggtcggggcttccttccacactgagaattctgcagtaatgcagatgtcctatactgtgctggcaagtgctgttgaacacttagaatgtggcacgtgtgactggggaactgaattgtgaattctatttaagctaaattaatgttaattgaaatagtcacattgacgagtagctaccatattggacagtgtaaccttagaagattcaaggcagaacctgggtgaggccgcccctatgcctcccaagactgggcgacctgtcactgtgtctctttccattgctgaaagtgacagagcctacggagctctcagagagaaattatcctgaaaatcagaccgaatggctgaacgcttacagatgtccctgcgaccgatcacgtttcctttcgtggccataagaattgtattaaatattaggcataggaggaatcttaccaggttttccctaaagcccttttctctcttgctgcatgaagtttcctctcctgcagctgcctgaggaaatggtttcgcaagactttattatttttggattttttggcatactcactgaagccaggcctgggtactcagtttccatttgatttctggctgctcagggctcactcctcctgcccatgctggtgggatttcttgtaggccagacagtggaatggtttagagcagccctacctctcccttctttggggtgactggagaggaaattgaggggccagctaccactgcttacaggaaatggacagattagggcaactggatcaacattgcattgaaaatacctggcttctgtgggtgtgaggcaggactacctgaatagatacttatgttcttgctccagagctgtcagactcaagcagtggctgggctttaggtgacttggtgacgttccctggctctagggtagctatggagtaatcggaatcaccgtctgatttcagcaattgcacttctcagagttgggcaatgaggctaaggagaaaagggatggctggaacaagtttgaggcgggaagaggagaaaggtcttcagccccttgggcacacagagacagcactgtcggcccccacccagagaaagtaaagcatgacttggagatccagagtctgccagaccccagggcagtctctcaggagatgagggaggagtggggcggaacagcgcagctgctgtgtttatgacacatcttcctccatggactgcttaggacgcttcaaccttaatatttgaggcgcattctctagaaatagtctttgtccactggctgagatgggtgggaacagaggagtaggaggtgttggctttttttaggatagaaggttattggtttatttaagtgcatttgctttggttttagcgttgtgaggataattaatttacgtatgaccctccttagacctgtaaatatgtattggtaccaactgtacagcaggccctgtgctgtccgccagcaagataacagtgaatgaaaacatctctgctctaaagtagatattctccccagcccttcccagcatggtctggaagggaacagcaggatattcagacagtgccttagcaaggaaggacacagtggtgcgttcgtgtcaaacactggtgtgcagaaggtagggagtccaggagggcttcatggaagagggagacttgactgcgccttgagatgtctggaaggagtacagagggctcttcaggagtcagaacaaacagataagtgatcggaagccgtggagaaagtttaattgttagaatttccatttattttggtgtgtatgtgctatgtttaaaccttaggaatttgcataccacttggtatcattttattagatcctagttttgtaggtctagaagtcaagaccaatgttaggaaaactgcccttgatatgtagagacacccacctggccatctcctgtcttccccagcagaaggatggagaaacagacaagctcctgatagcagtgacatgatgcatatgtgatgggcaaccaactgtgactctgaagccactttaaacactgtttctctgatttaaaaacctgtttggagctttggaagttgatttttaggtttataaaaaaactggactattttgagtttggaaacataatttactatttccaagaaaagagttttaaaaaccgattactttccctaactcctcatccccttgcgacaatttataaaagagaaatcaggatttcaaatcctgcacgtggagtgagtagcttttttgagttcagttcacgaggttgcactttgacatgctttttaagatttgaatatttttataaatcatgattatgctactgtttaatgagaacaaaagtggaaatcgcatctgtttgtctgcggcggagcatctcccggcctgtgtgtgctgtctgggaaagtggtggcccagtctggagagctgacgagcagcttgattagctgaaattacttcctgcagtagtttgagggtgtcagtcctgggatgaactgggtcatctcagggatctgggacacgggagccactctgagactcagggtggctgatggcccggactccaatcagaaatccccaactcttccccgcgtgaacacgtcgggcagattcccttccagcccaggttgggatctcagggtctgttccttgctagaccgggtccaattggtatcagccccctattcctgctttggaatagggggctgatacaaattggattgaacctaattgagatgccctgtagtgtcagctggtcccggggaaagaggctatacaggtgcaggcacgttccctgagggtgggagatagccgcggccgagagacagcagtggaaatagacctatagcatgggcatcgaggacaggactttggagtcaaaatgcttaattccattatcactcagcccgatcatcgatgttcaggttgaagagcctgtgtcagcaaaagagttgaagtaatttggagttctttgttcactcagctttagaacgctgctgttttttcgttttccttcaaactagtaaaactaaaaacgtttctgatttttaactgttactgtttttatctggaaaactcattaatctagattttgttaccactgacagcctataggtcccctctaaatattgtttttaatgtaacttctctacaacgaaatgcctggatctttggcatgcggttcaatcagttttgcactgacaaatgcagacatctgtgtaacccacattcctatcaagtaaaagagcattcccatcagcccagaaagccccctcgtgccccttcccaggcatccccctgcctccagaagcagccactgatggtttgtttttaacatgcatcttaatttaattttaattttaaaacatcacctgcattttcaaaccaaagaaaaaagactccttcctccaagaaaggtctcctgctggctcctgggcccatcgggtgctgttgctgtgtagccaggccgggtgcacattcttcacaggttgtagtgctcctggctcagaccgggaggttttctgaagtctagtcagctacacaactctacacctggaatgtcagacattcgcaatgcctccagaacaatggatggcaaaaaaattcattctgtgctttttccgggatcgcttgcatgcaattgtgcccgccgagcaggaggactccagattagagggagagagagcgagagagaggcctactcatcggtctgcataatcagcatcgaacatatttctgccccaacaaagagaacagtgtgttcctgagacgctgccgtgcagctcggaggctcactagtgggcggttctcccgggagggagtcgggtgtttcagcagctctccccacacctaccacccaccttttggggggccccagattttctggcccctaagggggaggacacttgcacagggcctggcagagggcagagacggctctggcccctgtgccccttcatcctctgacccgcatgaaataaaactcctgcaaatctacctatatgaccaattcatccccctcgtgtttggcccttccagcacctgtcactaggcgcaggcggtcagcagggattcaaaccaccactgggccactttgctgatctctttagatgcagtgtgtgtcttattcccatgatgctggtggccactccacattcttatgggggacctgtggggttcccaaccgcaccctgcatctgtctctccaagcaccacggacacttccagatagaagaagccaggctgcagtgtggtccaagccccttctaggtctctcccttttcagccctctctagctggctccactggcttggttactaaaattctagcaggactcaggtctgttggggatggccaagcttgaaatatttcttttttctttttcttttttttggcctgtcttacctacagttgtattttcctctttaatcataaggatttacatcaggaaaaataacctgagaatagatgtgttttgtttgaatgtcgtagttgtgccctttgtaaaattaccccagggcatgataagaaaaggagtaagcaattaaaatgcacagggctacggcaagggcaggcagatctgagtggaggctgctgtcctgtgaagtagacctggcaggggatggctgctccgggctggcctgggcctcgctctgcctctgttgttgctctgacctttgacaaatcattcccttgcctgtgtctcggttgccccatctgagcgagaggctggactaaaaggtcactaaggtcacttgtagcctgaccttccatggctctataattctctttgttatctttggccacttacatgtttgccatgatcattgccaatcaaactaggaatgtttagcagattttagacactcagactggaaaatacagacgaggccatagaagttagtgttgtcctagggatggctcctggttcacgcaggctcctcatagggtccctgccgctacacaccacgagcccaccgagactgctgcagcctcgctcatccagaacagaggcaccatggccaggaggcccttcctttgttgggtaggagctgcccccgtccatgttccagctcctcccaggcccccatggataaaatagggccacaggtgacaagtgagttctgtgaccctgaccggcagcagctgccagcgaaggaggaaggaaacacagacaggaggtctcagagcacagcacgccagacctctagtccacacagtcctgcacacattgccgtctttgtttaaagagaggcggaggcagaccccaggcattcaaatgatagaatgcttctgctgtgcctgcatccttccctcctccactaggagcctctggttccagcccagatgaacccactgggctgggaacgccacacaaaagcactctccaagccagccagaggtccctgagggccaagacagggctgaccagaggcagtgtctggacatcctactgggagctcgggaggaggcagtgacagctcaggccagtaatgggtattcttgagagcaatcccaggtcatcaagggaagagaaggttatgcttcgtatactgtgttcaggggccagataagttttaatacgttccagaagtgtgctcaagcaaaaaaaattattagaatttttaaaaattaatatttgtgcttaaagagacaaatgtcagagatctagaacgttaatttatttggaaaaagttcaagcagagggtgagagctctgatcgcccaccagccttagcattccggagttttcagggtcggagtgggggccacttctaggcactaagaagagctacaggcagggatgtctacagggtgccccactgcccatggggtcagaggcctggagctttaggcaaggcctcacctctgggcagcaaaggcggctgtctggagccccggggcctccctagggtttccatggttaagtcccagtgtttccagttagggaggctggagggagggggcacagggggcagggaaagaggcccagccttccctgaaagggagtcatggctcctgtttgcagctggaactggaagggggtaggcactaactgggccagaaaaagaagctggagcaaggttctagtgccggggctgggcttggattggactcagtaattctgggcctctggggctggctgtcctcgagccagcatgtgccgggcacaagccaggagccgtggcagctcccctcagtctgctcaggggccttgtgtgcccagcctgtgggccgccattctggccgttgaatgtgcccaggcctctcctcctcaaaccaccaagctcagctgatggccctggtgacccagctcctcccaggcagccaaccgaagcctccacggggcaggcactgagcagctttgatctgcccacctgctgccatgagggggacagtcatttcagagcatccttttgcctctcaccttcccgctgggaacaaaacccttaaatcctctcctcccctctaccagaatgctctgtcttctctcatgtttggctttttatacactatatttgacagtgtctctcccttcgaggttaagtgtcgttcaccatggtccctcactttctgctgctaggggcctttgcaggtggagaaactgaggcccaggcactgagaggagatctgagagccctgtgatgcagggtgtcagaggagacaggccttgtcctggcaagctgtcccctggaccctagcagctgcctccccgacctccgtggaggtgttctctcgaggcatgtgctcagaggctctccccggctggggccctgatggacactttgctcagaggcctctccagctctctgcaccgctccttcccttcctgcaggggcatcatggctgcaggtgtgccgcttctcccctctgttcctgcccatctttttgtccacatgtggcttcatccctctgcctcttaaggtggactctggttaggttgtctgggtggccacaggcatggctgccccatccctgcatcccaacagcctctcaaagcccccacccaggtcccttgccagggcttccttgtccaggagggaagtcctcccaagtacccctggagagccacctacagaaagttccagagaacagatggaagctcctactagactgactttggtgactggaaggaacatgctcaaaaggcacccccataccagtgtcacgtggaagagaggccagagaatggtggggatttgaacttgcatgtgctctgggtttacatcagaagtgtcctcccagcccttcccctacagggtgggttcagaggacacctgacccagttcaggagcaaccaaagggcgttgggggtctctgaagaggatgttccgtctatcactgccaatgccaggcagctcccagccaggctaattaggtcagcctcccccgatcatgcagcccagagcccgaccacgaggaccatgctggggcctggggaacggcttcattaccagccactctgcagcaacaggagcactctgggcttgagaacccttggtatcctttcatcttcttttaagaaaatgctgagaaaacaggcaaacttccctgggaatgatgggcgggcccagacatattccagatgggcatgattttggttcatgttgcaacaggctggacagcttgccgttgttcacaggtcatccgctagacaacagagcagcttatcttcgcgaagttgaaggcacaggaaggcttatggcctgacccttcacctacagatttgatagagacacattgccacgatgcacctctgccatggaactaataccttccctagtaacagagccaggccctatagcttgccactggggagagaatctctgcacaggcgaggacctttcaacctgatccttatcccccaagagccactgctcctgtagggtcttttattaattgttgttactccaccgccttgccagggacaaggaccctagctcctccctttttgaccactctggcccaagtggggtactcaaggctgtttccttcctctttgtggctgctgaaatcacactaggacatttaaaggggctgcagccacagccacggggagcagcagggaactcattacatcagagcattacatcatgggaccatgtggctcagcagccatcgcctctcttccaggaaccaccggctcttcctttcctggttccagccatgtaggggacaccatcaaagctcccaggagtgcaaacctgaacagcctgactcctcaaaagaaccatgagcctgccttctgcatccagctcttctgaatgccaaaacccctgacacctacagggtggggtagaagtctctcttccagagctgcatagccttcccagagtgagatttgggaaagggagaagaatgctgaacttatgccagagaaccttccacactcagagcctttagagtctttttatagaatgcagaaaagctgtgaccaaagctagactgcagccgaccctggggttctaatcaaagtttgaaggcagccgcatttcctcaggctcaacatcgctgcctgggtggacctgcacgggtgtgcccagctgttggtggcgctcactcccgtgcatgccatcatagccttcctggtgcagggacccacacacctgtaagcaccatcaacatccagatcctgtaacataagaggcaggaaaataaatagcagggacttgcagaatggctaaggtaagaaagaaaatgaacaaaggagcagggcccatttcaggggcctgtttgtgtgtgctagcccaccagataataagattacccatttcttatctccgcctcaaatggcctcagtgccagccccgtcccggagcagcgtcacagtgcacgggtgtccttccgtccttccctctcctgctgcctgtccttaatgacagtcacaagagcaacaacaacagctggcttcggggatgtcacagcacctgggactcacctaccctgactttgtagtgcctctcggcagaggctacattcttgaaatctaaatgtttaacgtctgctcttgagtgtgacttcacccctcccttgactcaagcctagatagggacccaggatgtgcatctctgggagcagtttggagggacctggcctcacttcgggcctgacctttggaaattcacccaaagcagcctgtttgttcctggctctgcctctgttgttgctctgacctttgacaagtcattcccttgcctatgtctcggttgccccatctgagtgagaggttgggctaaaaggtcgctaagatcacttctagcctgatcttccatggctctatagttctctttgttatctttggccacttacatgtttgccataatgattgccaatcaaactgggaatgtttagcagattttagacactcagactggaaaatacagacaaggccatagaagttagtgttgtcctagggacggctcctggttcacgcatgctcctcatacggtccctattctcagcctcccagcaggggcctgggtctgaggcccctaagaccccacgcttaggacaggaaggaagtggccagtggcaggcacccaagaaactgtgtggctcaacgctgttccagtcctgttgtgtaacaaaccaccccaaacctggaggtgtaagcaaccgtcttactactctcacagattctgtaggtcaggacttcagacagaacacagtggggagagcttgtcttcagtgtctaggacctcagctgggaacactcacaggttgggtggtccacctgcaggggctggagatcctccaaagcatcttcactcagatggctggcagtaatgctgcccgatgggacctctaccgggctttctgctcatacagaagctcagggccatgaggaggggtcccagctaacaggtaggagctgtgctgcctttgaggacttagcctcagaagcacacctgtgctccattctattagttacaagtgaatcacaagtccacgtagattcaagaggagagaattaggctccacctcttgatgggggagtgtcgaggttctagaagaacttgagattgcagtttgccacaatatctcagccgcgggatccccgcatcttgcagacaaaacccaaagtcttgataaaatgcctgtgtgtctgttctgtgcagattcctgaggtgggaccccacactgggttcccacaacctgtggactcaatacaggcaattcagcaaaccagctcccaacatctatccctgattgcagggacatttaacataaagcacagcctagcacagcaaaaggcagcttccctgtcatggagaaagcagagaatctagagctagaccgggtggtttcaatcctggctctgtcacttactgtgtgaccttgggtaggtgacttaaactctctgtgcctccgttccctcatctgtaaaagatttggatgataaaaatagtacctatgtacctccgtcatgagaatcaaatgggttactgcttggaagtgccaaggatggtatagaaataaaataaaacgtccatcagctccttcaggcccggaatgtgtgatggtgggtgctccagatattctacacaagagaagggctcagggcaggagcagatgcttcaggcacccgggaagactgcggctggtggagacctggggataccgggttatttctgcctccacactgcaaggactctcatctcttatgagaaaggcaaatgacacccagctgaggctgggaagtgctgtaatgtgggtggggtgatggggctggctgccatgtccaggatcttcattggactgctgtgtggagagtctacccttcccttgccttactctgtgtgtgtgtttaagttcataacttattcttgcctgtggatctgggagagtgagggacaggggcggatggtatatttaattaaatatcgccactccctcctctttaaggtcattacagtcaataagggggagaagaaatatctctttaggaggcctttcaaatgaaaaaaaaatgaattactgaatgcaaaaacagtcttatatctgtggcatccttccttcagttgtgatttaatatgtgcacggtgcaatacagaaatacaaagcagcttgggaaaaagtctcagccctaagaatcttatagtattaaaactcgagtaatcctacacaagagaaaaatacagcaaagcctgagcttggcccctgcaaaccagtgcactccacccgctgtgacccggggggtggtgggaggcctctggagagcggctgggtgctgcttttgacagctgaattttattaactgttttttcattcctcctgacggacctggcaatgaactcttatcagtgtattgtggcgagtacaagtcaattaatttcttttaaataacttcaactgaaattctatttgatttatattccaaaaaagatttccattccatcattccttcctgagattatggtcccggcagagttaatcacactggctacacagtcacccataccccagggagaaaacaggatcaaggagaggaggaaatgagacggaggtggagctgagagcatcctaaagaccctttattcagtgtgaggccatgtgctcagtgacaggggagtttgctgaaatcttgccctcagaagagcttatttctagtggttatggcaggggatggattggggagtgacaggaaatgtctggaagatgggggagacttaaccaagaagcatgactgggggcaccagggccgctgaggtttgctgctgagccacctcctcatttagtatccagtttctagggctggcatcccaggacaccctcccttagctcagccccagttgtgagcacctgacccttctatggcctgctgtgtggggccaccccagccatggtggtggtgatggtgagctgtccctgtgagcaagcctcaacaggctttgctgtgggtctgtccatcccttaaacacaggctgggacaagcagagctgcccccttcctgagggtctgcccacagggtcccccgattgtcaccagccaagtcttacaaacaataaggcctggcttatctgggagggagggagcaggagctgggtggcacctggcccagagagcagagcttagtgagtggctggtgacaatgacaagaggttagagctccagagggagggcggctcctgccctaagggagacaagtggtggctggatcccaaggctgggcaggtgtagggctgagagagatgccttctcaagccatctcctgccctagtgacaggcggccgagtcaggactggcaggcttctgggggacagcacgtcactgccctggggtgggaatactctggtgaagaattccaggcagtcaaacagtttggccaatatgagtttggacaaaaaaatatatatttgcaaaatatctgctgtggatgctgtattagtttgctagggccaccatagcaaggtagcacagacagggtgtggcttacagaacagaaatgtattttctcacaatcctggagcttagaagtccaagatgaagctgttggcagggttgcttccttctgagggccctcagacctctggcatcagaagtttctagggcatttgataaaaatgtgaacttctgagacactgagtcaaaatctttaggagtgtggcccaggatttgacatttaaataaactaaataagctcaccaggtgactcccagtggtgccccctgaagtgccatcgcatgggtaaataaagggtacagcacagcctcaccttcaaggagctccctagtcaaggaatcaagacctgcacaagacaatcagagaaagtgtcatgcagtataataatccaatcactgcccagttggagggcgcagaccaaaaagtgcctcaggagcttggagaaggaagatgggtccccatggagcggggagtgttagggaagcagtccctggaaggtggtgtttctcacgtcttcctctgcacagagatgattcgaggctgagggttagctgtgtgtgaggacagggaggctgggagatatgaggatctggataaaaacttatctcagcgttgagagtatctttgagcagtgtatcccttttgtctttatcaaaacacaaattttgttttttctgaaattcctgtttgctgtctggggatgtgatatcggtgcctgacacatcgtcacttaacaaaggtttgtttgctggcttaagagtttcagatgttctgtgtcggttcgtggctgcagtgactttatctctcaggagggaggtgtgtggctggtgggggtggtgggggaacccagctggtgaacaacacgtgctggtggcgagttctgactccagcaggtgagagttgatgttgttttaaacagtattcaccccacctgtcttccgatacacatattgatcccggccaacaaagagttgacaggagaccacacagagataaatatgtcagggctctcggtagaaaacaacatgcatggcggtgacggaacccgcagtggatgcagcagactttggaactgcacttccacttactggctgggtgacctcagcaaatgacctaacttctctgagcctcagtttcctcgtctttaagatcaggataataggccggacgcggtggctcacacctgtaatcccagcactttggaaggccaaggtgggtggatcacctgaggtcgggagttcaagaccagcctgacgcacatggagaaactctgtctctactaaaaatacaaaattagctgggcatggtggcatatccctgtaatcccagctacttgggaggctgaggcaggagagttgcttgaacctgggaggtggaggttgctgtgagcagagatcgcgccattgcactccagcctgggcaacaagaccacaattctgtctcaaaaaaaaaaaaagattgggatgataaaaatacctatcacattgtgatatggcaaggattaagctaattataaaagaagtttagaatgatatctggaatataagtatgcaataaatgttagcgatcaatatggctttttccacccaaatgagtgatgttctgcgaatttacttcaaacaagatatcacggctgttctctaaggactgggtagtcactaacaaatccattttccttatcgtgatctatatagctcagtgatttttctgctctctgctccaagctaagaacagagagcttcgcctcccagactgaaatgaagcatccgctggtacaggactgtgtatgcgcctctgtctggagggggctgtctgttggttaaagggtgtcttttccaggccctggagattgcaggcactaacagtccactcaggtgacaacgtgtcgtacttctctgtgcatgctgtggggactcagcctcacaccaggatgtgtcccttcaaacccagtccctgggggcacacaggccgtgggctgtgggatgtggctcaggaggcttggggagtccactgtcagccatccttggcatgcttcacgcgtggtgacccccaagaggggagaaggccacacctccttagagcgtggtgcttctcaaagggtctcactgtagttaccgtcttggagtgggttcatccttttgcctgcacttttaagtcatggggaaatgttaaatttggggagggtggaaaaagggtcagagagacagaacttgctgactcctattttgggactagttctgcaatccaatttcttttttcttaaacaatcttatagaaatctgccagagacaatgaataaaggcagaactccctggtcgaagcagagatgcctctttctggagtccctgaattacccatatgggatctgaggcttcctctgagccagtttgaaaatgcctgccctcggaaatcctccttgccttctgagccacgccctctgtcagggtgggcagggtccaggagagaagggaccgccgcttctgctagaaccaggcaggtttcgttttggatgatcattaccaaactcttggctcaaatgcattgtttaaacttgacttttctacattctcccaggacctgagtactaactaaggcctgagcaggtaagctgaaccgcttgacgtgataatccaaactgacaggattgtcagctggttacgagtctcctcctccttcccacgtcactcagaggacaggagggcagagggagagatcggaagtgctgggcattaggatcgaggatgcgctgggtgcaggacccaccgaggaggtgtggactctggcaagagggcctaaaaaccccaaaaggctccatctatagactttccacgtcagcctacagccaccccaaattttctatgattattattttaacaacacataggccttatttttaaaatctgctgcacttgagcaatttcatctgacgtcagctggctgccggcaactctgcttgaaaacaagaataaccaaatcttctaaggagtaatgctgaacctgcttcaaacgcaataaatcacaaaaaccattgtttacaataagtggtatctgattgctgttagaacctgtgtttattgcttttgtgcattatggtctcttgtaatttggacagccagaaattgtattcctttatgcagtgcgtaggcagggtttgtaaggggggaggcatctgtaattatgctgccagggagtgaggttgaggagcctccaaggagcaagaaaatgcagttgcctgtttttcatctgaggagctgggcatcaggcttcccactttccagttcttggaaccctcagggctccattggagagagacctgggcaggggaggataaggagtggaccttagagctatagtgccccagatcagagagcccttaagtggcctcagggtgcagagtgccaggtgggtgggcagacgccggccccacaggaggctgggcttatggttttcctggaaattgccttggtctctcctgcacgtttcttcctcattctccaccatcctgacgagtgccctgactggactttgtaggtgaaggctagcagcagggatctaggaacagctgatgacagaattctttggcacctctgtctgcaaatttgagaagcagccacttgaccatgtggcctggatcttgccattgtcagtcagtaaatggatgatgttgcttgatttctttgaggcaccgttaggaagaaggtcagtgtgtctgggtgtggtgatctgtcattctcctaattcaaaacctctggactcgaagaagagggtctagtttctctttcatgaaaatagaccacgctccatctatccttgctgctttggcttcagttggttcttccacccggaatgctcttttctgtctatttcacctgtgtgaaacccacccatccttccagttcctgcacttccattaatgacttccctgaacttgtccctcctatgtccttaatctcagtagaatttcaccaccattcccccagcctctcaagcctaaaaactagggttcatctgagacatgtctttttccctccacccaacactagcccagcacacagagacacttgggaactgtttgttaatgaattaatgaacttgatagttaaccaccaactctaacccaaatcactttctggatatttctccaaattgtccctcttcgcatttctaccaccacagcccaagggagggtccttattcaacaggaccacctctgaacagcctgtaaagccccccatatccccctgcaccctaggacctggtgttcagggtcatgtcttagcctctgacccccactcccacaacctctactccccaacttgctcatttactccaagtcccttccggttcctgagcacaacatacatgctatttcattactaaggatgtttctctgcccagaatatccctaccccttcttcacctggcttcccctcttcagagacttggctcaggcaccacctcctccaggaagtcttttccagctgtgcctgtgggccttggggggcccccgtctctacttccacagctcctgtgtttttctgtgtagtaactcttgtcacaattataacaaactgtaaaggtccacccttaaaggcaggaatactgtgttatctgtctgaccatcccccatgcccagcacaattcctggcccacagaaggtctcctgtgaacgaggatctaaatggaactggcacgaatgctcaaatggcacatgaagtgcagagagcaccaaattgtattaatacacaattgtttgttgacttagaccaagttcataggcggctccccaaagaaaccacaaggactagatctgagaagttgcagccctccacggcatctgagcagagtggctgttcctctgtggtggctccatgagtgagttagtgggcacagaaggagcctggtctgccgtgttgattgatagctgtccccacaaagcatgggactagtcacgcatgctttattaaaaagataaatgaatcaattttgtgattctaaagctatagtctattggtcaatttgtacaagctctggcattaattagatgctgagctggacagcagggtcccctctccctcctagagcttagaagggttctctgaggctccaggacttgagtttcagtgagaactatggatcccttctgccctgcccagcctggctggctgagcagtaaaggaagtgaggagagaagctaaggcagggctctacttacagaagacccttgactctggggccatgggcacctgctgggcccgggactgggaagggctgaccaggagcaactattcgaaggcagcaccctgcacacagcctagcatctgcactgctcaaggccaagggtcatgatttccagattcatttattttaacaaacttccccttaatacacacacgcgcacacacacgtgggaatgctacactagccaagctcgcccccagcaccgagaaacaaactggacgcactcctttctcttcctcttcccctgcacacagcagaccctccagggacaatgcacataattcaggcttttgtgccatggcgcagcaagctaggttatgattataccagcctctggggtctagccaggtagccccatggccgttgatggctttgtctctacaggaaaatacatttggagttacaaacagctgacttcttggcagacttcttggaattcaagcagctcataggcaaggggctgggaagtggaccctcgagccggttggccaatcagcaggtcctccagggccctcatccatgcctgccctggcactggggaggccacagaggaattagtgaacagatctcagcttacaaagcctcacagtttgatctggggtgaggcaggaggcaggaggcagggattccctccagaccctcagagcagaaccaagtcttgcgtgtggtgtcccgccagcccatgtctctgaagacaggggaggcagcgtgggctttgtcaggctggtgacggacgtgcctgggagcaagagcctgggtccagaaccttcctgtcacagggaaagtgcagagctccctgtttgtcagctgcttcgtggtgcggagcctgcaaagtccagggagaggtttcgtgcagaaagccctgtctccctgtgcccgctgtggacgtggaaggcagaggcgcgtcctctctcagccactctcctccagcccgggggtctgccgtccgctgagctcttttttctttaaacttaggaacagaagccatttgacagaaacttttaaaaacaacctaactaggctgggcgcggtggctcacgcctgtaatcccagcactttgggaggccgaggcgggtggatcatgaggtcaggaaatcgagaccatcctggccaacatggtgaaacgccgtctctactaaaaatagaaaaattaggtgggcctggtggcacgcacctgtagtcccggttactcaggaggctgaggtaggagaatcgcttgtaccggggaggcagaggttgcagtgagccgagatcgtgccactgcactactccagcctgccgacagagcgagactccgtctcaataaataaataaatagaacctaactaatataacatttgaaatttggtcctttccagaatcttttcccatctttttaacatgtgcagagtggatacaaggctgcctcgtgtttcccatttttctcctaatggaattcatgtctgggtctccatgtgtcgccggagtccactcccgctgaatggatggctgcccagggttctctgctcctagggcacatttgctcagcagctccctgtggtagaaaactggctgggcccattcccaccactggaaagtcactttagtgcagtgtcttcttgcctctaagatacattggccttccattctttgagccttgtggggttaatgagatggagagtgaagtaggtatttttgttctccctcagaccctcatggacaagtcatgttttacctctgtgcttcagtgttctcctcttcaaaacagggaggatgagaagtcccctttcccagaggactatgaagattaaatgagatagtgtgtagctcatcataaatgctcaagaaaggggagcatagaagtaataattagagtaaccccctgaattatccttgttctgggaaagcagacaagtccggtgggctgggggccaacttcctcagcccctccgtggggacccagcccggagggaacctgagacttggcctatggctcctcctcccacatgaccctgacgctgtaaatgtcgcctaacagtcttaagcagttttcactgtgacctgttgttattttccttgcttagaagtaaagatgtaagcgttggagcctacccgttgactcgtgagagaacccagtggtcctctgggagggcaagtgtttgagccactggggattagggagcaagagcctggctgcaaagagaggggggatcttcccttctccaggagatgctcacggatctcaggccctcgctttcctctgtctgctgagccccatttgggcctctgcctctgctacttccgtggcctagaaaagacagccctagaaaagaaaccccagctgtcccctccgggaaggctctgtgcaccttctccatgctggtgtgggcgctgtagcactccctggccagtacccaggacacctgagctccccaccagcttccacacgcagcaagcaccgcatgtgcttgctccccactgggcctggtccacagctgcacacgccaacacatgcacctggtccagggccccagccatcccctgccctccacagtcactcctaggtctgagccaccccacagctgtccctttcctttctcctatccccatatcatgaactgggtgaccatcctccaagagagtggctccagatgtcctgagcaggcatcagaagcagccaaagtgttcagtctcctctgctttctcggaaaaatgttttctttttattagtgacttcccccaggcaatccttaacccagggaaagaggctgctctgtgggcctagtgagggctgggctgccaggcggcatgtggagagcccacttctctcctctctgggagtcctgcacagaccatgccctggaatgcactttccagtctcaaggcttttctcatgttctgtggggtctgtgcccagaggctatgtcagaagctgcagccaccaagcggggacagcctccctaggtaaactgacactgaccctccgctagtcagtcttggacccgtccactaccccgtcatccacccatgacttcttccagccagatccagctcctatgttgtcagccttggcaataccccagggtcccaggtcccccgtcctcccctcccccccaggctccctcccacccaggcattctgacctgctagctcagacccagaatcctgcctcccatggcatccgatgactccccctggccagtgtgccaaggcctctagacagctgctgccacaccctccaactctggccagccccgcagcagaatgaggcttgggcccaggaccagggtgttgccctatttaggagctgtcagcagagggagtgttggcataaaccaccctggggtatgtgaacccagaaaatctgagacaggtctcggtgaatttagaaagtttattttgccaagttgaggactcgcctgtgacacagcctcaggaagtcctgacgacatgttcccaaggtggtcgggggacagcttggtttcatccattttagggagacatgagacatcaatcaatatatgtaagaagtatatcggttctgtctggaaaggtgggacaacttgaagcaaaggcaggaagacccaaagtgaggagggagcttccaggtcccagataggtgagacacaaagattgcattgttttgagtttctgattagcctttccaaaggaggcaatcagatatgaatctatctcagtgggcagaggaacttttattaatgaacttgattttattaatgaacaaatttattttgaatagaatgggaggctggtttgccctaagcaatttccagcttgagttttccttagagattttggaggccccaagatattttcctttcactggtatcatccacccaggagagaagccaggtcagggagtggcagagagaggaggacgggtctgaagacttcctagtctcattgaaggtggtcagtgaccaccccaggtgagggtgaagccctctgctaaatagaaagcagcccagacaaggccaaatccacctcaaaacggggtacagggcaggggtgttcatcgtgttaattctgttgggcttggcctctgcgctttcatgggctcagatacctaagccttccagggcctcaggtgcctgatctgcacccagggagggctggagggaaaggagcctgaaggggctttcagggccttctgtgattcgttgactacttcaaacaaaaacaaagccttcccagccggggtgatggaggaaaataagaacaaagctggctgtgtttgcttgtgttggaatccaaggaggggacctactggaatttccctccctttgctggaggccaaggtcaggccactgccctgacctctgtttcctgggccctgagatcatggcactgtcagagcccactgggaaggacaggcgcaggtgattatttatacaagtcttttctttcagtggactatttacgtactcccaacactttaaggaaagaaactttggtttcacagtggatgaaagttttcccatgctttaaggtgactctttcatacatttcttcttagtacaacacaaatctcattataggaatttcagtattttaacaaaaggaaccacagtcatcgtaatgagatccccgaataaagttcagttcattttcatctgtcttttctccccaaatattattgctagaaatgttacattatcataaacccgagttcaggatgcatagtttccacaattgtcttctttcctccatatacaaattctgattactgctttcattttacaaagaccacccccccccccgctccccctcaggggtgtttccatcttctcagatatttttctttgccttaccccaagctacgtacataaccggatggctagaattaggagagtcgatggtggatattcctgtatccgtctatctgccccctgcctgccatgtggtgtgggatacatgcaggaggtatcctgggaggggactgcttcgaggggcttccccaagggcattccttgtggccatgcagaaggccatgcagaaggactcccagggaaggctgtggcccaagccctcctagccagctctgcctgcaggaggaaggacaagggactcctacatggcacccttggaggcgaggttcgtgcactggaagtttccaagcagactttatttccactcagccatgtcagaaacctctagcaggactggtgctctaacttcacacagggtttcagagtcagggccttctccctagtacagtgaagctgcaggtgcagcctgtcccctaggtccatgtgctgcattgggccagctgggcagtcatgagctccctcagcatcctcaggcccagtagccactcctctctgcctcctccctggtgtctattgatgtctctgcagggaacatgctccaggtgacccagacactgagcactttgcaggcaggcagcatcctccccatagctaagagtagtaactacctgtaccccatttcttgggaggaaacagaggctcagtttcagcacgttgttcaatagactgcagccagatggtaaacatcagagccaggacgtaaggctctgttgaattccaaagcccacactcttaagcagtctgtggtcttagtagtatcattaattatgcaatgatgcatcaatactcaggggtcccgtagaggtagttgggacgtttatccctgaactaaatggtcaaagctcactatgcttactaagtttgtgcacctgcttttcacagcctttctgcatctccccttattctcattagttaaacttgccatggtcattgtttttgcctaaagcactagtacccacctgacctgctgtggacctgcttgttagaattgtttgcaaaggaagcatccataggctatgaacaaggatgctggggcttgcctgtgaacaccaagcttcagtgtgtgtttattctaaggcttttttttttcttttgagatggagtctagctctgttgcccaggctggagtgcagtggcatgatcttggctcatggcaacctccccacctcccaggttcaagcaattctcccacctcagtctctgagtagttgggactataggcgtgtaccatcacgcctggctaatttttgtatttttagtagagatggggttccaccatgttggccaggctggtctcgaactcctgacctcaagtgatccacctgcctcagcctcccaaagtgctgggattacaggtgtgagccaccacacccagcctctaaggcccttttgattgctttttgaattttggttatgtttgggatcacagaaggatgcttgttcttatttctgggcagatggaagaccttttacctttttgaaatctgatcagaaaaaaaaaaaagctttttgcaggttggagagtcatcaggtggggtgggaaggtgaggcgggtcttttgggttctcttcccacaaagtaggctggtagccttgagtatgagtggggaaacccatggctcagtctctggagagagagtttcttctcctccaacccaagccctgagtctggacccccgagcttttattcctgactccagtggcaactctctctaaagccatctaccacctccaggccaggctgttggacgtgcagctcttcccctgctgccgccacagagtttacagagtaagcccagccctgcagaggtgaccagtgctgtgcagatgtgaggacctgcatggactcgactttgtcagtgccctgattgcgttccctgtggagctgaccacgagagcaggtgttagagccgtctctgaagaactgaatgttagaatctatgcgcctgcctgtgggggtggttacgggcatttagtggggaggggggatggttctcagaaccttggggggcagaggcattcagaactgcctggcattctcacttccactggtttctttaccagcaccagtgtgcattttgttcagcaaacccggaactcaggaagctttgccacctgggtgcctgtcagcggcagcacggtccaccccagggtgggctggggcagagggcctgcatgccacagcgagagcagaaagggagcagagccattttgtagagcgagttttccaacccctcttatgatccttcctctattctaaagcaaaggacataaatactaaacggtggttcttgccagtgctgataaggaaaaccagtaaatgcaggagtctcattaagaaaatcctaaaattttagtcttatcactgctgcaacataatacagtaagtatgttaattctaacctcccttagcttccccccgccaaaatccctttcagctaaggctggcaggaatgaactgcactctggctacagactgaagccacgtctgatttggatttttttcctcgccttggcttcacgtagtgagtctcctatttgggtggacatggcttttaccccctcatacttcccagctgcctttgccattattcagttcaacaaacattgaggaagtacctactgtgtgcaggccacagtcgtaggagctgggaaatgtcagagtcagctgagttcatctctttgcaagagccaataagccgacgagggagcaatgatttataggccaagcctgccagccggccttgtccccagcaaagactcatttcaacaagcttctcttccaagtgattatttgctgtttgtactgcttggacttggcacgcttctacaattccttttaccaaagaggaaagagggaccttgaagtaagtacttacctcgtaaagagaagattccatgcgtctttcgggagcttgcctaaacaccaccagcgttgctctgtcatgtgaatgagttttttttaccagcatgccttcctcttccgaaggccttccccatctagggttttttctccccatgacacctcagtgtcgtaggtagcggagatgcaagtgttcccatttctcggaaaaggaagccgatgctggagcgggggatgacttgctcagtgctgtgctagggagtggcagagccacccaggcccaagtgcccggctcctcatccacatctctttctattacaccaaacccagagcgggcaggcagggcagaagagactacagaagcacaggcgcctgctgggccggccttggctcggaggggctcaggaagacccaggaagtagcaggccaggaaatacctttaggtcctgccccgggctcccgggaggcgtcggcaggagaagcagggcagcagctgtgagtcacggtgatggatgttcatggctcacgggtgggcggctcgcgcgtgcactggtgccagggtggccacacggctggcaggccagtgggctgggtgtcacatttcagcaacatgatctctgctctgcccaagtgaggaggaacatgcttgcgggcatctgtggccttcaactcagagagggggtgggtggagggacgaggtggttgagaggacacctctgattcgatctgttccgttcctttgctggccttgccaccctttccagtgctgtgcatgtgtccctcccaagagtccagaaagctggatttaaaagtcaaagtttctgaaggacttcatggtgagcagaacacatttggtatgaaaacattacaggaaaacaaaagcctcccaggcttcctgcctctcagcaaaagaattggaaggcattttccatgtggggagggaggccatttctatttcatggggatcttaaaagtaattttgctgcctgtaattttttttatccaaactctctcagactttggttctcagctggatgacttagtgatctctaaaatgtgctgacattctggctcgtaagaatacatactgttacttttaatgaatgagatttgtttttaaaagatctcctcaaatcagctgagcactccaggtgcagctatggcactgatgctgggaggggaggccaaatgcctgacttcaaggtgctgggagctaagtattcctgtctcggcacgtaggagggaggaaaaagccagagaagacttgaggactgagaatacaggctaaggccaggcccacgcctggaagagaagaactttctctttgtctccttgcccactgcctgtccctgagcctgcgggactgggagggcagaggacacttctggggtttggcccagagaatttatttcttcttttcttgttttccgctacaccacgtggcttcagaccatgacatttctgttcaatgccgtcagtgccttggtttgaggagaatgtctgtgtacccagcttccatggccaagaagaaatggtggccggagcttgctggcatctgctcttgccctgtctcccttcctctctctcctgcgtgaccagcagccaagggacagttccttctggccaggcagtgggatggagctaagggggaggagatgcaggagcaaggcccagacccccgtcctgagcttggcggcgaggggcctggttttgccctgcctgggaagagtaaggcatggaacctgctgggactttcctcgctccccagaggccgagtgagccccagcccctgccccccccccccacccgaggcgagccagcagagccagggcccacccgctatttttagaaagctatcaggtgcgcaggacgcccagttgcctttttccacctattcgggctcattctagggatcctgtgttgctgccccaggccccacctgtcctgatgtgattgtcttactgtggcctggagctggcacgaagcttcctcccgatgcaacccagccacccttctggcctcatctggccatggcaagtcacgtccctgacatccgtggacctgcagccattgtgtcctcagaagcgtggatgttgggccctaatgtttgccctcctctgcttccttgagaggaaggtaaaggctgaaagggaaaagcaggttaggaaaaacctggaatagggatcccatcgtgaggagtgttaagtcattgagtagaagattctggagcctttgttctagaggaagctgcatggagtgtgcagtctggcaggggatgcccacgtgcagtcgtggtgttcattgccagcgcatgcagttcagaggaacgtgggcggtcggaggaagcgtcacaggggaggggaaaccagagctgtggtcagggcatgcgggaggggtggcatcgaaggcagagggaccacaaatgctgcgctcttggcctggcagcgggacagcccatgcgtgactaaggaacgccgaggaggcacgaggctggtgcagagggctctgcaggggccgggggaggagagcctggagagagcctgagacgccctgaattccaggtgaggtgtctggacgagatccagcagatggtgggaaaaaccactgaaggttggaggggagagagaggagcctagtgggctggtggcctgctctgccctctgcctaccagagtgacctggcctcctcatggtcatagagcagcagcagccgtgggtccagagcagcacctttgtggcctgccctccacacccagctcacaagtctctagcgtggggtgagctggggttggctccgtggctcccaagagcccattgttaacgtctcttcccagctcctcattaggagacagcaccttggtagctcgaaacggccacagtgggaatatttatacaacagaaactgatgaacgctgcatgcacatcagggtctgggtgggttttttttgtccaccaccaccagcagagccgggtgttaaacatttaccagtatagctctgggtaacagggagcccccgcagggtttcgtgctcggggttagcatggtgggctgagcagtgaccacacggggctggtatcctgcgttggtggacatgtgttgtgtcacttccctgctaggaagctaggatggggagtggggatggagcctcaaccaggagaactgggcgacggtggccatgttggcccattctgaaaccaggctccttaacatgggctcccagaccctagacacggctcacacggaggacacgtgtgtttcctgcctctgcttcatcacctgagcaggccctgcccagctacactggacctctttccagtccttaaatgcgacctgcttcttctcccctttagagccagcacgtgcttgcccctccctcagaatcacgccccccagccaccccagggtgggggctgggcagcattagtataccacactgtgtctgcagggccctcgtgggtgttgcccagcaaaagccccgccatgctgtctgcagcatcccttctgcctgctcagagactgtggagcccagagcagggaaggactgccctttcctggggtgggtggagaggcttgcctgcttagaaagctgtgagcagaacttagaggctgtgagcagaacttagaggctgttcatctccgggcacagagctagagcctttctcagcgaagagtcggcttggtcttgacagcacggtgaaagcagtaggattggttcagtgttctcgagttccaaaacacgcagcccacgaaattgtccaacaacctcgccacatgggttgtgctctcatttcagaggtgaggaaactgagggccaggtggttagcttacaccccaagcctccataggagcaactggtagtccccaggccttgatcttgattcctggagccctaaaccccgagtcagctttctgcattgaaggttttggaccattcatcccaaccaaacgtagacatcaggagcagcccaggctctgccaggagatcaaggtgcaaggcccccaggctactgcagaccccatcaccaccacccctctgggacctgcctctaaaatgggagttaatggcggctgtgaatacactgttgcatttgttgctcttttgggaaaagaaaaacctggcttctaagagctgttgtattttatttttctgtaaagaagaaattaattttagtctttctttttggtttaaaatgttgttctttgctttttctgccctacaatttaaaaggaaacatttgtctgttgagaaaagaaatggtaattatagactaaaaattgtttctattctgatttgaaaaagtgacaaaaaaaaattccatcgcacagatggggctctgctgacggagggtgtttaacaatgaagccctgggccggtttggggctcggaatggctggaggtgggtgtgggattgggtgttgtggggcgaggggctgtttccgaggctggtctccatttccgatgctggttagtcactagttcctgcactctccgtgtggttcaacagtgggaggaagaagacgtgactggagatgtcacctgtggaccctgcagcccttataaggtgggctgtacaggacgaggccacgcgctcccttgcatggaccctgagcccagagagcctccaggctttattcccttagcccagaatttcacttttcagcctcccaaaattacaattgctccaagtcctttgatcaataaagcaggaaactgattagactgtgaaattaaactaataatgtcacgctgttaaccctcaatcaatggggactgagctcaaagtgaaggctacttcctagatccatattaccctttggacacacgtatttacttttttaaagaaatcctaggggcgcacacatccccagaccgcctttctttcctgccagcgcagcctgactcgcagtgctatctctgcggccaccctggcggtgctgccgtgtgtgtggtgtggaaggccaagatagaaccgagtctgcaagttggctggggtaggggtgccccttgggccttgggagtgggactcagaacttctgctgaaagtgtgatcctcatggcccccagcccacccttaagcctcttgtcactagaaacctctctttggggatgatgctgagccaccctctaaccatacgtagggccgaagtatatagtactggctgaaaagcccctttttactaattttttttagagacaagttcttgctctgtcacgcaggctgcagtgtgcagtggcacgatcatagctcactgaggcctagaactcctgagatcaagggatcttacagcctcagcctcccaagtagctgggactacagatgcacaccaccacacctggctaatttttttccccattttctgtagagatgggggtcttgctatgttgcccaggctggtcttgaactcctggcctaaagcaatcctcccgcctcagcctcccaaggcactgggattgcaggcatgagcccctgcagctggctaagagctccattttaaaatggatattgggttcactccaccactatgcatgctgcagtatggggtttgctgagacctttgtgtgttcagtctcatgagagagagcaggggtcatggtttttcttattttgcttctcccttccccccacctcagcccctgttgcccacccgcccccaccaaagcacaggcttggtatagacctggctgattggaggtgatgagcataccgaagaggcgagtgagggcaggtgtgagggctgttttcaagggctggtttggggagtagagtataataggtctagtacagaaacaggacctagcttagaccagcctccacctgcgggctggctctggggttcatggaggcagggctgagcccgccacccgtcctgagacagcctggggggccgcatttgcagactgagctctggtcgcagcatgacaaaggcttgcccgttgcagtatcgaggactgagtctcaggtgtgcccatgtcctgagaggccacggcttgtcactcaccaaagtggtgagcatggatcaagctaggtgtcaaacacagccatcaggaccggctcagctgcggcacttcagtccggctctttccatgtgctcttcaatatgtggcttcagttctgcagggctggaagggcagttgctattacccccatttaagggataaataaattgaggctgggtggttgaggggtgtacacagtcacactgccaaagaggcagggctggctctagtactgtggcgtagagccctctgggtgcctgagttctctccaggaggctgttctggaatcagcgaagtctttatcctcttctggccttgccattgaagaggaggagctcgtaagccctttccatgggccctcccacggcttgtcctcccaacctgtcagttccatcacgctggaatgttgccaaggatcagaccccctctctaaaagtggtgatggtatttaataactaattactctaatgatcctgcagaaatgctggagacctgttttaggagagatgtcaattagagccatctgcacggtgaataaaggagccctcccccagctgtactgttgaaacatgttagcgttttcctaccagcggccatatggtacttaacgaaagtgaattgttcacactgcacaacccgcgcctcctgatgaatactagcattttgttttggaaaatagttcttccatcgtgtggaatatttttcaatgcagtaagtagcaagttggaagccagcaagcccttgaatgcaaaaagactcccatcacctcaagatgctcttccctccatcccagcccatcccctgcccccgcccagctgccaagcccagctccaccccagctcccacatccctcctgggcccagttcttagcatctgcttctgaatctgctcaggagagtggaggccaccaagggttcttgccccatcccaccagctttgtgtctgtatgaacttagaaatggaaaacctgaagccatacacagagcacagagctctgtctggaaggatgcagacatgggcagagtctccccagagttgaaaagtagggtggggtgtttaactgggtgtgtggcctcacagaagggttcgttttctatctgtaggatgtttgttttaagaagtgcaaagttcaggttgacacctggatgcacagtgaggtagagggggtaagctgggactgtatctgggactcggcagaagcctggctgagaagcctgtctcctcctcgtcacctgtacagacaagtttcaaataaatagtgagcgaaagtcattgccacgtggtggccagacagctgggaccagggtgcagccaccctgtgggttccattaaccaaaaacaggcatgttgggttcttgttgcctgggacgtttcaaaagcagaccactgccaacatgggacctatttggggggtgaggctcagttttgtgatgctcaagggagaagaacaggcgaccgtccccatcagttccatcccccacccacccactaccagattgctctggcaaggggaccctccgcctccctcgtggggctctgtggcctcagtgagctgagaccctgcctccgagccgccaggacggagctgctttattgcagtctgccctgggaccaacgggatttcacttgccagtaatatctattccggaactttccctagaaccagagtcacttattaaagcttaataaaaggccagattgactgcagttagtgacagagaagacctgccgcaagtcctggtacccaagacgctcttcacaaaaccgtgggcccataaatctcacttatttccaattccgcagcaactgatcccaagttacaataatgatcctaggttcagctgaacatgtccttaaaggaaatccttctgggtgaaaaatagcagaaatgtgctcccatctgttcctcatcagcagactgcactatactatttgctttccacgtctgtgccctggatactttctcaccctctttgacacctgggaccatagagatgtgaacctgaaagaaccaagtcgccacgactcccaagtgccacctcagtaagggacctcaacgggacgaccaaggcccagtggaagcctcgacggcccttgaccatggaagctgcccagagcatctcaaataagtcagcagcctttccactgggcctattccacaacgaccccccacagaccagaacccgctccactggggccatgcctgggagttactccaaagagttaacctttcctggtgggagaggggtggaggggaaggctgaggccatttgacatgtgctgcctggtctgaacatgatgctgtgctcagacactgaatttgatgaagtgcattgtaaaatttaaaaacaaatttaaaactctattaactccctgtaatggcctcctcctgcagtacatagacaacaccggctcactggcaaggagaaaaagtactctggtttgcagtgtgcttggcttgaagcagaatggagacggtgggagctggtgaagggaatggggagcccacgcaccctctgcacccagggcagcacccagggcggcacccaggcccctgctagtggagctttgtgggatgtgcatcgccaaggttagactttttcttgctcctatgttaaaatctcactttcactttcctttgaagctaaaacacttccttcaagaatgcaccactggagtgacaagattgtaagattatcttaacttgggactgaggcctgggcggtggggagctcactagaggcctgtggtttggggtcagcatgggggtgggtgtcaggtgggaggaggtgtgttcccagcctcacccactacaccctctgcacggggagaaggatcagggcagggagactgttcgccacaggcctctgcaaatcgaggcgcgttcagggtaaggggaggattggcccggctccaggctaccaactggagagagacgaacttttgttgagaagggagacagccccacagctgtgtgtgcacgtgggccgagaggaggagctcagctggcggtgagaaagcctgggggccgaggggagggttccctctacgtctctgcaactcacaggcccccaagctgaggagcagaaggtgctgcctggcctggtctttgacgagttcaagggattttctgccaaccagtggcttccctgtgtgagagcgtctctcagtttttcctgagcacgtaaagtggtttggagatattgggggaggaaaaggtgtacacatacggcaggcctgggggtcaaaggcagcagagaaaccatgcgtatgtgtgagtgtgtgcagatctgtgtgtgcacaagtaagcagtgccttctgatgtggctgcttgtgggctagtcctagggcatgggtttgatgcggactcttgcatccagggaagtatttttctgagagttcccccaccctctggggctggcattctaccccctttggaaagaaagctgggatggtctaagcagggaggggtcctgtggagacttgtagctcctggcccagcaggattcatggcatttggcgtcagagaaaacgtgagcctctgccgggagtgaagcagctgatgcaaaacaaggagccctgggtcgtagatgcagctctgtgcagcctctggggagccttggcgctggctcgcagatcaaagctgggagacctgggagctccctgaaagctccttccctggcagctgcagatggggtgcggcgtttgggctgggtgatggcatttgtaacagtgtgaggaccccccactctcccgggactaacagtgtaaataagaattggggcatttacgccaatgaagagaacagaatttccttgtgctgacaatctagaagatccgcttgtggacagttgaaatgctaattataagctaactctgttttcaacctttgtgaacccggtttgggctattttgtatcaataagactgctttcagaaaaaacaaatttactaattaactccctttattttaaatacatgagactttcctatggtgtctgttgtttttttttttttaaagaaacgtgtgcgctatgaggtgtttccacagctctttttggggtatgtaatagtcctcctgatattttaattgatatttgaaccaagtaaggacccgccaatagttgaaagtccccggtttcggggatgcctttccaagcaaccagggattcctgtctgacatcccgctgagcagcacccattttatcgtgtttcttcccacagcacaggaaacaggacaaccggggcttcagatcatgagacctggtgttgaatccaggtacaatgctttgtgaacctgggaagtcacttggccacattgcagttagtatgacttaccttgtagggtccttctcatcattgttatttttattagataaaatcacatttgtgcaacacctagcccaatgcctgttccttaacaggcatttaataagtgatggttattatgtctcaatgcctttgttgacacattatgtcttcccagcgtggaattttcctctctttattgttttctattgaaatcctttgcgtcctttcagaggctactatgaatgcccccacctccgagaagccttcctgtttggccttagccagaatgacttatttctttgcagcatcacagatgctaacttctgttccagcccaagttcccgtcttccttctcttctgctcagtgtctctccagctacactgagctgcccctttcctgccacagcagggcccagctctgtgtatggcacagaggctcatagagtggatgtgttttgagttgttgagtgaagctgaggtcccacagtctctttgaggctccagtgcttcaaaacttcccttgacagactactgtgggtgactagtcaactgcagaattagaaagaaaaaacagtgccttttctggtcacttagagctgagggcatcttggatttcacagcctagaaccccctgcaggctttttggatcccctaatcctgttgatgctgcagcagtatcgactggccctaaaagcagctgctaaaatgcgtctggcacaaaggaactttctgggctgatggaaatggtctgtatcatgattggggtggtggttaggcaggtgcatgcatttgtcaaaactcatcagactgtgcacttaagatttggacagttactttatggacattatatctccataaaattagttaatttttttaaaatgtggcctgaccagacaggctggatacaggggcctgttgtggtcttcctgtggccttgggaaatgcagctcatgccagcatggcacaggattgctctgggaggaaaagagacagaacagtctctgcatttgtggaacttaaccctttaagtcctgagctaggactccacacacaggtgcctcgccaccctctcccaggagacctcaccctggcctgcctccaaagaatcagagccaagcctcacacggccacaggctgaggcctgcctctcacaggagaagagaagattaaaattaatgtaaaatctaacagatatttgtatacccatgttaatagcagcattattcacaatagccaaaaggtagaagcaactcaggtgtccattaattaatgaatggatacacaaaatgtgttgtatacatacaattgaatattatctagccttaaaaagaaagggaatgctatagtcatggatacctactacaacatagatgaaccttgaagacattatgctaaatgagatgagccagacaaaggaaaggataaatatggtatgagtccacttatacgaggtacctagagcaaattcatagagacggaaagtagaacggtgggtgccagggtttcggggaggcgggaaaggggagttattgtttttagtgggcagagtttcagtttggaaagatgaaacattttggaggtggatcgtggtgatagttacacaacattgagaatgtacttaatgccattgaagtgtacacataaaatggctaaaatggtcggttttaggttttgtatatttgattacaataaaaagaataaagaagagcaacgaaagaatcccaggcctaaggcagcctcctggcccccttaaatttcaacattttaaatgttatcattcaggggactgcttagcagaggatgtggtttctggtctgagaatcaaaatgtgggaaacagaagccctctctgactgccaggccctttcagagcgacaggtatccttcctaaatgccaggtccttttgtcaagacaaaggtgggtgaccacatatcgcgccactggtttaacttgattttcccatctgactctctcgggcaacgtgtatcctgaagctgatgatggaggggtgaattttactttatcgccccagcaactcccagcatcatgattggggtgaccccatcctcaagacccaaggggctccaagctgcggaaattagagtacgctgtgtggacggcagcttggctgtcagagcgggttggctcctggcctgtaattcagaatgatacccgggtacttgtcgcagcagggggctggtgccggcctgagcaggcctgccgtggagagtttaaaggaggctgactctccccgttttgcctcagggaccatttttgatttgttctttgaatggcagaaggcctggcccatcaaactcacaggcaacccttcccatgctcagaggagagagagctcggcacagcagcctgtgaagggggctgccaaccttttcgtttataaaatactgctggattcttgagtcctgatctctctccgtgaaggtttgctgcagtcaggccgttaggaggacaaagaaagaatctattggaagggcccgagcctgtgctgtgaaaagaagctctgtactgtttatgttctggttgatgtagataagtaggtaccatgcctatagtaaaggaaagagagtgacattctgagacaaacttctggttcccttcctactaacgaaatagcgaaagacagatctcacacacacacacacacacacacacacactctctctctccctctctcgctctctctctctccctctctcgctctctctccttcaggtgtggtgtaaagggctgttctggacctgctggcatccccattttgtccgttacgtccctgttcttggcagaaacttgaggtgcacatgctactctggtcccacgccaccttgcccctggatgccactttcttgcagtctgactttctgtctctgaatttgcatttgtcctgagttccctttcagtcactggttgctctcgggctctgtcggctaattcagttggtgggtgccactgccaccacccttcatgggcagtgctgccgcttctgtgcccctggctaccctctgaacactctgttgcctcagtgggaggggtctgcttcccccttttgccttctccatcatactacagtgcagggaagggcattgaaagtcctttaggaaggacgagtaacttctagttgagtttgagctgccgattcctgcggtgggcagaaactacacacacacacacacacacacacacacacacacacacacacacacacaggcacgcacacgcttctccagcagatcgggaggaggcatcctgtgtaaccactcatgcccaatattatgtcaggtgcattagtgcttagaatgcagagttgttataaccatacaagatactaggattcatctgttggcagaatttggagcacagaactgcagggactaaaggaagtaggaggccccatctgggtatttgggaagggatggttcatcgctctttgctgagatgtggggcatctggagcttggccacctgcaagaagctgcatgtcgggtgggaaactggagaggcagggctcagggcagctggcaccaccaagtctacttagggatggaaggctgggttctcaaggagctcattggatcctggtttgacactttgggctgttagaggctttggaatgtgtccaaagggtggcaggattcatgccacagccttcatgacagtaggaaatacttccaaaaccccatgatgatttatgtgtgaggaaaaaggaggctctggtctgtaaaggaaagttgctccagaagcactgagggtacctacagatctcactttgagaattagaacgagggtggatcactgagcccgtttggctggaccccagttagtatttgggaaaacagaccagaaggagcaaggacttactcaaattcataccaccaataagtagcagaactaggatggatctcgggtttctcttgactcgtagtccaggattcctttggccacagaaatagaattatgaaccaagtaaggcagcccttctcaatggattctgcatttctaaaagctctcaagtgatgctggacctaaggaccacactttgagaaacaaagatgcctgacgtcagtttcacttttaaggaagccagatggcatgggtgcaaagctggaattcctaattctccctcctatctgtttggctccattcttattctgttttatctttatcaagatgtctaaaagcttttggcctagaccctcaacaaggagattatctgtcatcctttgtcagctccttgctacccagatcccagcctctctctgccatacaggaagctaaaatcgtgactgaaacgtccattccaaacactcagaagagtgtgcctgtggctttgtgggggtgaatgtgagaatgatctttggttgtggggagggacacactgtggaatatgtcactctgttagctgtctgggctgcacatttgtgacagtgtaacaatttgtgccattgatctatttcagaataagaggttctgagtggcaagattgtcagggcctttgcttgttccaccagttctcactgatctggaaacctttcctagagatttggagcctagattgagagaaagaacagaaggcatctctgagtgactgacaaaacaaataggcatcaccaaatgtgtgcacacaaaatctcgttctttcttcatcatcaatccctccggctttaattcagaattgttctttaaaaaatacaaattgactataagattgattagatgcattccaaattcagagcaaattctgcaaactcctgatctggcaaggatgaagagaagggctgggaaagatcgtaccagcaagaaaattttgctagaagctaatcagaggtgaagcaactgccaaactctaaaattttatatccacgcttagaaagcacggcagccacccagggctgatgagtgtagggaccctggatccctgagtcctggggatcgtactggttcacagccctaggtgtctctgttacgttcaattctgttcagcagattgggaagtatgcagtgtactgcagaatattttatcttttaaatggctaaaatgttttattcttgtttaagattggatgttgaaaggaattgatttcagttatctcaaaaatatgtctgtatataagaaaaatgagacaataataatcctagcagactgatgatgctttgctagccttatcctgcctccttttttttttttttttttttttttttggagacagggtctcactttgtcacccaggctggagtgcagtgatgtgatcttggctcactgtaacctccgcctcccaggctcaagccgtcctcctgccccagccttctgagttgctgggactacaggtgcgcaccatcacaccagctgatttttgtattttttttaagagatggggtctcactatgttgcctaggctggtcttgaactcctgggctcaagtgacccctcttcctcagtctcccaaagtgctaggattgtaggcatgagccactgcacctggccattatcctacctccttctgactccttcatacattgtatttcctcattctctttttccagccacttcttggcagtctccatagtttagcttaggtatacttttctctttccacagtctgagcgattatcccctaaactccagtgactccaaaagcttgtttctctaggctccaacttctgttaagcaaccttcgtcccatcgttccacctcagacctccatcctcctctgtaatcctcatttcagggaacaggtgtgccgcccaccagccctgtgagttgactctggcatcctcccactttggaacttcctcgtttctggctcctagttgtttcccctgccccatgttagaccctcctcagtccttgcctgggccatttgccttcatgtcccccaggatcttctgtgtccaggctcccgtcctgcaatcccgccccctggtacctgcccagccccccagaagtggtcactttccctcacacttcctctgccggggccgtggtccacacctgcactgtccaatacagtagccactagccagtatttgtatcaattacaattaaataaaatgtaaacttcagttcctcgatcatgctggccaattgtcaagtgccaacagccccagggggcttctagcttccatattggacaacacagatcatagaagcgtttccaccattgcagaaaatcgtactggctagtgctggtccacattgtcctttcctcttgagcatctttctttcctctccttctctccaaatcctccctctttcccaaagagtcacatagacacatccttacatcccaaacctcatcttcagtagcgcagaacttggcacttctctgagggtacactggaacatagaactcttttggttgcagtagatgggaacccaactcaaactaactgaagcacaaaagaaaatgtgttaactcttgtaatggagaggcacaactcaggcttcagcacagccagattcagtcactcatgtactgttggacctcgtccatccctcctccactgccctctgtggccagcttcatgctctgtcctacagaccgtcccctccccatgaccagagaggacggccaggagtaggccctgcttacatcttttctgggcatgatcctgaaggaagagagacctttgtttttggagttcatatatcgtatctatgggatttgggtctgtttgggtcatggaccctgattcaatccttatggccagggggatagaacaccctgatttgcctggcctggtcacgtgcttaccccaggggtggggcacaacacccagccatagctaatgggctccctgtgggaaagaaagatcctactatcagataaaggagggaatggatcagacaaaatgcagatttcacaactgaattctgttgggaacctttctcactttcttcgcttgacaggaatctggatgcctgacaaagtatctgaacagatgttcaacaaatatttggtgtgttaacggagggagacgtgaatggatggatgcatgggtggatgcacgggtagatggatggatggatggataagtagatggacagaagatgggcagttatatgcctagctatggagaaggccagaggagagaaccgggctccagaactcaaggggcttccttccatgctcatcagaagcctctgcctgtcttatggtctcagatcttcttgaggattggttcagccctgccagaccatgggctccttgagggcagtcctcagccaaatccatctctgccagcactcacagccccagcacagtgctgagtgcctggccagggctggctggtgggctgaaagtgagcggcagctctgtgcatctctttgttgtagctggaaggtaagacaggagctaaccagcaatgcagggtgatctcatctgggtgtcagaggcagcaacccttcccagattgctggtctcggacacagtgcattcaccgttctttctcaagtccctcgcaatcgaaaacaggattttttaaagagcttttaaaaaagcccaacccaaaaaacaaaaaaaaaaaaaccataaaactggtgctcccagtggacagcagcagggctggtgccttcttgtgtgagatgatttgtggattgaggccccaagtccagatcctgggaaacagtaggtgtgtcttccatccagaagctcttgtttctggcaatggccgtagtggtgcagctgctcaaactgtctagaaaactgaagaattaatcctgggaagtaattagctctcctgggaggggttgggctgtgtgctgcctgttgttaagtcattgtcgtcatactgatggccttgggaaatggcattaagaagtctaaagggctgagtcaggcaaccagggtggtggcagtgttttgttttcttttaatttccaaccctttgatctcttgtctaaaatagcctctcagaatttagcaattatatttcttccctggttaatactgttcccttcctctcttcaattgcatctttttcggtacatgtatttgttaaggaacaaaaatgagttaggcatttagaggacttactttagtcccagtagacccacctgcctggaaaattggatgcctagggaggcttgtgcagatgagagggctccatctgcacaggggttcaccagttggctataaccaggtctgctggggaagctctcccaccttggtgtctctggttctctccctctatctcttgttctgtttccatggggcatgtgtgctctgatggggacagcccgcgttcagggtttggctatttggggaattgctgagtctcctactttctggagttgaccttttctgcaaagcacatgccatcctcggggcttgtcaggcatttggaaggggacagtctccagggagccagcatccagccactgtccttcctgcattctctccccagggtggaggccagagagagatcgttcttgcagaggaggggcaggcttctgcctgaaccctcagagagcctcacctggaccaactacaagttgctcagccccggggagttgaacctggaagatgatctcatagcagccacctgggcctttcaccagggacacctggggaaggaaccaggtctagttaccactcaggcagctcctgctgcattggatccaggctctttgtgaccttgggcaagtcactcccaactgtctgagcttctgcttcctcccctgggaaattaagattgcattagtcggggcaggctaactattggaacaaaccaccccaaactgtagtggcttaatcatgtagcttccttctcaagtcacggtgtgggatgggtcagtgagaagcagctctgctccaggagcccgagaagaaccaagcctccttgtgcagtgtgtccctgccgtctgcgcctcatcctcctctgcagtggacagggaaagagagatgaagaagacatctctgctctaaccacatggtctagagggacccgagtcactcgcacacacattctgcacatgtcggcaagaactcattacacggctccagctagaatcaaaggggagctggagagtgttgtccagctgtggtccccaagaaagaggagggcacagacatgggcagcgccggcgacctctgccacagagatggtgatgaaaagtccctccccgggatgtgcgggagggttaaatgtaaaatgtcatcattcttcaagcacagtgcctgacccccagtaggtagggggatattgttatttttcttgtttcttctcccggatattcccttgaggtttatgcaaatagcagaccaaggcaagaaatgaaatctatgtccctgccctctgaagttactgatttccgtgtttccttgcagtgtaacgtttcattagaccttccagatgggggaaagaacaagcagattagaagtcagatagtgcctaggagcctgctccatcggtttctgggacggctggagcttcaaagctatttggtatttccactgccgaaaggcctcctcgggagcagttgtgttttaataaatggctgcctgagtaattttcctcggaggaattgcgtcgtggatgtgtacgctcctgggggagagctggctgctccctccaccactccagatgctggtgcattatgaataggatgcttggggctgggggaactggcaagcctgcccaccccgggctggtgatgtcatctcccaggtccaccaggtggactctccagggctctgggtcggggcttgctggacagggagagtaggagacatttgtgcaactggcctgaactgccccttccccatggccgctggcaaaagcaaccgctttaagacccaggggaataattcatttctttgacataacctgactgatgctgcccccatcagataggggcagtctggtgggtggggcagggaaggagggaagaacaggcctgagtccaggatcttgcccgtctgtggggagagaagacgggcacgagaaccacggtgatgtgggattgcagcgtgcttcattcactcgttatttacggagccctaccagaggccgggtattgcctgggccaagatacagcattgaaccgagctggcaggtggagactgtggtgcctgagagcaggtctccggggctgcgctgcctgggcgtgaatcctcctctgccactttctagctgggagactttgggccaattgcttgagctttctgtgcctcagtttcctaatctggaagatggagatagccatcggaacagctgcctcacagaattgttatgtagattaaatgagtctgtgtttagaagcactgcccttagggaactcacactccagagaggggacacacagaaatctaagtaagtaaactatataggccaagagaaggcaatgagagtgagcgggaaagaaagcagagaaagaagttgccattttacaataggatgggcagagaaggcctcactgagaaggcaacatttgagaagaggctggaaggcaataagaacgctggccgtgtggatagtggggaggatgggcccggcacagggagcagtgtgtgcaaaggtcctgaggtagaatggggcctaaagtgatggagccgctgcaaggaggccagcatgttggaacagaggggcagggggagaccaaacaagagaggggagtgagcaccagggcctcatgggtcttaagaagaaggcctttggctttttcttagggtaggatgggagccattgcagggacttgggagagatgatctggcttgtgttttaacaggatcactctggctgctgggtggagaatactctgaatgagggtgaggaaggaaggaaggagacgtgtttaggaggctgtggcagaaatccagctgagagatgacagaggcccaggccagggtggacgtgggaagaagtggttggtgttaggaggaaacacagctgccagccgaggaggctgaatgtataagaagcatttgtgagtgagagacgaaaggtctgcaggccagggctggtcatgagtccaggaaaagatagagaaagaagagcactggcttcagagtcgggcacaagagcctccttccaagcaccaccacttcccccaagtggccttgagcaagccaccgcatcactgagcctcagtttccccttctataaagtggaggcagtgctatgacacacgcagtttaagtgacttgcagagtagcaggcatgctgtcggtgctccgtaaatgctccctgcttcccctttctgctgcctgtttgcagctgggtaaggaaggcttggcgtcctcggggtggggtgtccccaggccaggaggctgacacccgcagagctcaggggtgtggagagagatgcaggcaccacctcgtggtaagcgaaagggggtgctggcatctccatctctgatttcatagtgaaatttgccaggcacttcctctaggcaggaggccctggagtatggggtgattaggccccggctacactgctcctggggacgagtcatttcctttgtagccagggagtgggtgccagcccagtcctcttctcgggcgtgaaaaatactgagttccttttattctagcccctgaaggccatcctgatggtgccaggttggcatctgacaccagagtccccccagcctcaggtggggaacacagctttctctggactcccttcctcccgcctcatccaaggccagtcctctgcagacccctttgttgagccccagacagtgggtgtcagccctgctctgtgtgccgctgcagggccagccctctgtaaatggactgcctgtgcctacagaccgggttgggctgagccaagagcagatggtgtctccctccctctcccagggcctgctgcagctgagatctggcctgcagacagctctccagaccctctcaggggccctgaccccatcatccccattgtccttagggtgcccactcccttgcctgaggctgggctctgtgcagccacacatgtgactgtgggcagggaatgtgactgatgggtgtgagtagggcttccacccaggcaactggcaggggtggccaatgcagtgtgttttcagagcttagtatgtcatcagatacaggggaccctgcagaatgagggctagaaaagattggggccaagggatgaggcagcagagtgacctggaatcatcaggaagacttcatggaggaggcaagagctgagctggaggaggagtgaatcatttatatcaagatgtgaaataaagctattcctgttgttttggggcctcaggtgaggccccaggctgtgcatgaaaggtatccggcacccccacattagaaagaggagctagacagccccagggcccgtctctactcccatgagaaaagctttgggctgactatagggagcagcgatcctagaagagagctggcctaggagggaaactgaggcttctccccctctcccggggaggagctccccactctaccagcccctcaaccagtactctgtgggagctgctgctaccccaagactggggtaccccaagcacttagaaggatgtgacctgtgttccttggaatttgggggacaccaaggctgtgcctgaatcttaccaggaagtgtccagatgcaaaaggctcccggggatatctggaacatgcagtggagagcgagggttgtgctggtggcagtaggaccagagttggtcatcaagggagagttatggttgtgagtccagagtggacactgcacagggagacagacttgagccatctgggaagaccctgcccaggaggacagcctgccagggtgtgaaccatcagagccgcctgagggagcatttccagcagagcacacaccctcgtggagctcccgcagagaacccaccacagtgccacagcggaaggagggccggcaccgggtctctgcacacggaggctgtctctgcccgtttacatcactctgctcacaccttgcccttgtgctcccagccccgctccctggccactctggggaggctgaagcagcagttagtgagaaggaggcaaaaccagagaagggcgatgctgccattctcattacccgattccgagcctgggtccggccagagctggggcagaggggagaggctgtggaccagatatgataagagttctgatgaaagattggactgggctttggagagaccaagaatgtgatcatgtttaggattgacctagccatttactagctttgtggccccacaggtcacttaaacctttacgttaattaaacccctccctgcctcagttcaattaaagtacctggggattaaaagagctggtgcatgcacagcccttggtacggtagccagcacacagtaagtgcccagaaagtgttcgctttccgtagtagaagtggtagcagtagcaatagttgtgacagcagcagtagtacttctaccgatagacatcgtgcccaaaagtgaccacccctcccgcctcccccgagaaaaaccccaaatgctatttgggcctaacagagtgcatgtgaaaagaagtagcgggaggaaaagatacttgtttgctacttacatcctgctgagttcagcctcagaaaccagttacatggccatcatttcacaggctctgtagtgagaagacagcagtgctggatgaggccaggagcagcaatctctgcagtctaggtggtccaggaaggcttccaggaggaggtgaaggcacagagtaaggccaccagcaatacagaggtggcgctatgccactgggaaaagagagtggtctgaggcctgtgtgcgtggccacatccttctcactcacacaccctgtcttgggacagttcagctcagcagacatcagtggaacccccggactatgtcaagccgaggcagggccctggggacactgagataaggagcaggcaggccgtggcttcaaggagctgccaacctcatggggttaaagagaaaaatcatagaatgccaaaggaattttgctaagatgaattcaggggtactgcagggctcagaggagaatgcagcccagcttggggaccctgtgaacacacacaggcacccagacacacaggcgcacacacacaaacacacacaggcacacacacacacagacacaagcacacagacacacacacaggcacacaggcacacacacaggcacacacagacacacagacacacacatgcacgcaccctcttccctcactgtcttttccccaaaaccatttctctttctgggcacatgatagagttgcatgtccccacccacttagagttagatcgtgaccacatggcttgctttggccaatgacaccagagcagaaaggacacatgctttccaagtgaaaaccttgagagccagtgtgcgatgcgccaacccatctctccttttgccacagtggccagtctgacagccggggtcctagagagtggatggcctggcacagggcccccagccgaccagcagtgagcgcgtggcaagcagtgagtgcgtggcatgagtgaaaagcgtacctcgccgaagccattgaggttttggggactgtttagcatcatagcgtcacctacctatccaggctgatgcaaccatcattatttttaagcggctaaaatagaaaactgaccctgattgagtcttccgggggctatgtgggccctcctctgttacagcccccctgccctgggagtggaagatctggattctaattcgtctctgtcctaaggctctgagactcggttaccaccattgtcgaagggggtcactgatcccttccccgcctgcctccccaagctgctgggagagagtccaacaaggtgggtagggggatgtcttcagagacctgggagttagggaacagcctctgagcactgcattcatcagcgtccccgccttgggccctggaggtcacagggaaggtcacccttgctctgagtcaggcaaaggacacatcaggaggggaggaccccagcggggtgtggtgctcctcgctgccagtatgcaaggggccagcagtcccaggctgcccagcgggggtggaagtggcagcctggaagcaaagtatccctgcttggttaatctaaaaataaacagaaaggcaacaaaatctatgtttcaattactgcacacaagctgttcaaacagccagctctgcactggagatgtgaacttgtcaacagaggctgcctcgtttgcatgcttgggtggtgataaaacacacaacctcgcaacaggctgccctctggtctgggcttcttttttttttttaattaaattaaattaaaaacacggacatagaataaagacgatgaaaatctgaagcaaacacatcaagatagggtagcagctcccaacttcaaaacaaagaaggctgtgcggttggagacagcctggtactgaggtcagcaggggagtgggcaaaacagggctcagtggccaggaacagaggacaaaagtctctcccaagtgaccaaaaacgccccttccttgggggtcgctgctgatcctggaggaagctccagtgggcagtgtgaacctctagttcccaaagccaaagtcaaggccccggagatcccctctgtcggggagagatgggctataggccagccagcaggggctctgggggtgagccagcaggctgcttgcatggcgggcagagctgggactgccatccttggctgtgctgcctttcgccacccatcttaattagacactgtcctagctaagacgcagtctcctttctgatgaatgggaaatgaatggaaccccagggagctgggccaccctggggttctgggtctaccctggcctaccctgcctgctccagcccagcgtggtccctcccctgccccccagggtgtttttccgttttatggctgtgccctcctgaacagccctccctccctgaaggcaggagctgtgccctgttcttatttcctctcagtatcttgcactgagccgggtataatggggaaggaggtgggcagtgaacttgacatgatttgatgagaaaagggcagatcgtgcattaacccaagggcatgcctggggaattgcttgagagggaaaggggggcacgaaggcctgactcatggagtggagcgccagaacaggaagtgggctacgtcatggtttcctggggagggatttggacaagcaggaggccccccaggtcccactagagatggagaccagaaaggtgggcactggtgcttaatgctggtgaaaggttcgttccacaaatcctgctcactgaagtggctgtcggttttgcattcactccggacagggatgttaatgtccccggccctcggagcaattccgcagccgtcaacccagatgctagttactcggtgaaataaaagagtggtcgagtctctcccgaggaagataatatcctgtcacaggcagtatgatctgccggccatgtgacagccgttccctaatgtttccaaatagacttttgaatagactcttgtctagaagaaagcaaattgcaagagcatttttggcagccaaatagagagaaggcatcagtctttcttctttgcaactcttgccactgggtctggctccaggcaccgagtaggattcattcatcagcttgggccactgatgaacaccatttcctgtgaagagggagcttgttgaattagtcaattctgcaagatctagaataatcaggcatgcctgagaggcggccctgggagggggtaagcctgcttggagaaggaaagttacagcaaaatccatctcaaaagactgggatcgtgtgtttgcaggactacagggaaacggggctggagttttcagtgtttgcgtccttgtggagccacgagaacaagcagttagaaggagccacattggttattcgtaatgacaactctggttgatgctcctctacgtaatcaaatggtagccaccacagctccctcatcgatcctgatgtttacaagttcctaatttatacacgcctcccttcttccctcagtttacgctgatattgtgttgccaactgtcatttccagtatcttttttatttttcattatcaccattttaatgatttacaccaggagcaatagcacaaatgcctagtcaattagtcccacgagaaaagtctctgaatcgtgtgtgcttttttgaaaaaaaaatcactacatcaaaacccacggccagattttctcaaagcaaaggtgcacatgggaagggagggaaatgggaggcttgttcttttaatattgttcatctaaaacgggcactagtactgcttttccaagacagggagattgctttttgtgcaagaaatggtgcccagaaatggaatcggtggcatttttcctgaaacttaaccaccagaaaagcattttgaacatttgtctttttagatcatgtattaagccctgtcattatggaatatggctttttccaaatatatatctgtcccccagggccatctagggagtcagaatgcctggatcctagggccgaatccaggcctgctaactcgccagatcttaggctggtgcgtctcaaactttaacttgcatgtgagtggatcctgtcccattccccacccctcatcttgttaaaaatgcagattctgactcagtagtcccagggcaaggcccaagactctgcatttctcacaagtccccaggcgatgctgtggctactggactatggaccacattttgagtagggaggagataggccactatgcccagccctgggcttcaccctcttgcttttcctgggttataaaatgcgaaggtcagtgctggactgcttaacaccagcaggatgttgtgaggcaaatgatgtagtggctctaaaagaaccttgtgtggttagggcacttcccagaagacctcccctctgagcaaaggctgaagcacacagcacaaccacagtgctgttaatcacgggtcctgtgttgttacaggggctctccaaatcctctttggctttgtgtaactgaaacttcgtgtcttgagaccagcacctcccgtttaagtgctctcactacaaaaggaaaacaaggcaggagcagagcgcagaagaaacttctggccatgctggctgtgcgcgtggcattgatagtgatgatggtttgatggtttgggggatgggtatattcccaaacacatcaagttgtacacattaaatatctgcagctttttgtacatcaatcacacctcaataaagcagttaaagaaaaaagaagagccttgtgaagggtgaggacttgctgctgctgtcctggccactgtggggtgtttagggtgagggtccttcccattacccctgggaccagctgcacccactgctgctgaggaagattcagctctgccagacgttcttccctcaaagctttggactggctgagacctgggaacatgtgcaggtttcactggcattggagaaagcaggctccctgtcttctttaaatataaagacaatgccctaaagcctttggttccagagattgatgccacctgtggtccccagagtggaagcagacatcagaggtcacggctatagctctggtttcttttctttttttttttttttttgagatggcgtctcactgtgtcgccaggctgaagtgcaatggcacaatctcggctcactgcaacctccgcctcccaggttcaagcgattctcctgcctcaacctcccaagtagctgggattacaggagcccgtcatcacatccagccaatttttgtatttttagtagagacgtggtttcaccatgtgggccaggctggtctcgaactcctgacctcaagtgatccacccacctcggcctcccaaagtgctgggattataggcatgagccaccactcccggccacggctctggtttctaatgggacttgtcaaatccctgcctcccctctttccccagcctggagatcctggtagatgctgctcatttgggttcagaccctggaccctgcagcagatgctgctggaaacttctggctgcaaagcaacaggacctggttaggtggtctgcacactggccctggctgagtggggcctgatggcgaggtggctggtgaggactgggggccaggatgggagtggaaatgtggcaacgagaacctttcagttcacctggggccttgatattttaagaaaaggagctaaaaataaatccacaccttaggttcctcatcctagagtggaacaggagaaggctggcatcagcctggggcactccagagtttcctgggtttctgctgcctcagaagatttaaatgtgaggccttgggtccaggctggcacctacacgtggcccctgcaaaccccacatttcatgtccacttggaggtgccgaacacctcaccccctgaggaatatgtcactctcagaggctgtgtgaagggccagggctagatggtgaggcgtaatttaaggactcatctctttcagggcaatataaatgcagacggaccttgatgggggggcctccatacattttggccccacctgtcactcttctcagcctagtcccagccccgccatgtgccccgtgctgggagggtcactttggtctgccaaatgttccctgagccccctgccccggatgcccagccctgtgctcgggcagctccagtggaggaaacgaagggggaaaggtggccctgtctttagggacgggatcagaactcacacagggagtagaacatgccagtccgtcgctggggtcctaggccttttgagtctggcttctatgggctctgagaagagagggcgcatcaaagaaggcatccagcagaggaggccagtgtgggactcacccctagcctcagccagaagcaagacttctgagctaatgggggctccatggggctgggggtcactgggggctggagcagccccaggaggcagggaggcatttccgaagggcatccccacctcccgctaacatccacgtcaagtcgtggccaagccgcctctccagaaacacccagagagttcctttgtgttgcatttgccaagatggtgttctggctgctgtttagtattttgctccagaagaaaggctaaaagatgcagaaagggaaactaaaataataaagacaagcacagactgttccaatcgacttggcagcacgtctcccccaaatgaggcaatcatacattttctgatcggggccggccgggccgaggctcattcctcagccagccacctcggcttccctatctggagacagcgcgggtcccctgccttcctgtggattaatcatgccttcggggccctcacagccggccgcccactccttcggcgtgtcttaatgataggaacgaggaaagggtcattagccacctgtgatcctgtgtacagtgtgtacacatggtgcatgttaatatgtgtgggccgccaccagcagccagaatactgtgtgtcaccggacacagatggcctccatcccgcccatgagctcaggtgcacgaagcatcctgttcctgagcaggcactctccgggcccagggctgagggctgctggacactgttccctctgctccagccccacatggacaatgcaaacacacagaggctcatggcgactcttaattatttactcatgaattattcatggtgagggttttccaggtgggtctgcgtggcagggctgccgatccgatctccagcaagtgtccaggagtccgacaccgccccccaacacaccagctggtgagcaattagaaacacagtctgggcctggggcaccaggatttccttcctgcaatatcctcaggccccaggtagcccaagccttttgcaagcctgggcctgggacatgagggcacttgagccacagggagaagctcttccatcaaggcaggccctggggctagtgacacgaggtcccctgtgtcgtgggtatttatggaggatgacctccccccccccctcaacttgtgtctcccagtgtccctgagtgagaccaccctacaggatcctggctgacctagcacagagggcctcgggagctgtgcatgtttgcagacaccaggccacacacactgcttcggatttgactgtgtctttttcctcatcccagtaaacctgcccagttcctgttgagacatgagggttctagggacaggcagtgggagaagccttaggagggagccaaaagtcaggggctgaggctactttgtcatctttattttgatcctagttaagacccacctgcctcctgcaagggaacagaaggagcccctggggacagggtggcccatccctcattcctgcctctcccaggtgctctggcaccccatgatgctgaccatgctgaagatttggccccatgtgccaacaggaaaggaagtggccagtttccattcattcccgaggaacgggcagcctgaggggaggttcgtctgtggaggtgtgaggtcagggctctgtcaggtggaggacactttttggtgagcaggtgagtcagcaggtgagcccacgcctcatccctcagaagtagggagatggcaggaatacacccttcaccgtctcctggagataagtgatgggagggaaagacctttctggcagggccggggatgctgttgggcacaccccagcgctggcctctgccccacctcctctgagagatgatccgaattgtgaggcagttgcacttgaccattgggattttccccagagctggtggatgtggcattgctgcatttggtgatgctgggggaccttgtcctaaggtttggggtgcacctgtgtgcattgagacgccagcatgtggctctgaaggggggactggattgcagcaggatcaatgaccgaacattccaagaagtgcttctgcctgtcaggagctcccagtgacgtgttccctcccttgttcacatttgctccggttctgtgaggaggtcttccacttcccctctctgctccctggaggtggggaggtgcatcacagagaaggcagcggggagcctgacagcctgagctggcttcctaagttgtgtgtgcagtgtccaggctccagacttgaatctgggctcagagctgggaaaccgaagcctgatgtctgtcccagactgctacgaagatgacccccctcgcggaggcgcaggcgtggtgttgactggcaggctctgtgcacaggggagacttcaggaggccaggcatggtggctcacacctgtaatcccagcactttgagaggccaaagtgggcggatcacttgaggccaggagtttgagaccaacctggccaaaatggcgaaaccccatttctaccaaaaaaaaaacaaaaaaaatacaaaaattagcgggtgtggtgatgggtgcctgtaatcctgtaatacgcaggaggctgaggcaggagaatcgcttgaacctgggagttggaggttgcggtgagctgagattgcatcactgcactccagcctgggtgacagagcaagactccatctcaaaaaaaaaaaaacagaaagacttcagggttctgccctcctcccctcccgtctcctggccagcatcggctttgctgcctgcaagatcccaaaggccagagccaagttggcacataaaatacctgtgaggcctttcacatttcacccacgactagcaccaaactgtctctaccctgcacctcagcgtggcctatttccacccgtgaatacaagatttttctagcctctagagcattttcttcacatgtgcatgtaatttaaacaggtgctagcaaagcactaaccccacccaggttcgagtcctagtgtctttgtaaacggtcccctccatacaaagggatggctgctgctcagcctgctctgtcccccttggtgaagggccctgtgccaggctctggcagttcacgggcagcctgccaggaaagggggctcaccttgacaaggaagctttgtgatgtgttttgtcggtaattgcttgaccagtctcgtctaacgtacctcatccattccaggcctccttctgccacaactagcatttcctgatgcctccctcaacaccgctctgggcacacatgtatgcccatgggaccttgtgacacactggctcggtgcccagcagaaaatatttaagttgccacctttggtcctttaactgtgccgtctcactcagggtaaaccgtgcaactcctttctttcatgacgtttgaaaggggaaattaaattgaggaatgaagtctcaccgaaaggctggcatgcaaattcttgacctttgttttgagtacacgtaatgaggctgcaactagatttcaggctccaggcccggagtctccatctcctgcctggcattttaaggagacttgaggagctgagcatcagggtgggggacgggagtggtgggaggtgcggggtgctggggcctgggctttgctttcattcaccagaactgtaaggcgcgggcatggcatggcccagcaggtggtccccaaggcagagagtggagaggttttactggggcctaggagacccctttgacctgatcccaagcacatctaggcatgtctcagaggggccgggttgctggccgccctcagtgcgtaccctcctcacctccatcctccccagctggaaggagatggcttctttggcgatatgtgaggttgtgttgttttgtaggaaggtagggactgatttatcacatcagtcaggccaggctaggctgtgcttaggtaacacatagactgccaatttcagtgccttatcacaacaaagattcacgcccccagtatgcaacatccagtgtgcgtagggaaacgctcttccatcagatggtggcaccatctggaacatgtggcctccaaggttgccatgacgagcgaagggaactgagggtcatagatgtttgcaaagggccaggtctggaagtggtctccatcacctccccacccatcctatccgccagactccagacacaggagcccaacttaactgcagtggcagctgggagagttcctccttgtgcccagaaagaggacatactgtggtgaatacataacatcctctctgccacattaggatccaaccctagggatgcagtgtccctgaggcagtgatgatcacgagccccttgttggcaggtgaaccttgggagaggcgtctacactgtgagccccagctgacctcgacatgcagatattctccattcaggcctgtccttcaaggttcgaggtctgatttactaggactgtaagacattttctctttttttttttttctttggtctcactctgtcacccaggctggcgtgcagtggcacgatctcggcttactgcaacctccacctcccgggttcaagtgattctcatgcctcagcttcctgagtagctgggattacagatgcacaccaccatgcctggctaattttcgtatttttttggtagaaatggggtttcaccatgtaggccaggctgctcttgaactcctggcctcaagtgatcctcccaccttggcctcccaaagttctgggattacaggcgtgagcccccacgcccaggctaaggtaggatgttttcttactccagcacctacgtggaacttccagtcaggagactcagcgtttctttctgtgtctgagattttctcttcacacaaatgtgtttgtcctctctggaagtgctcagcaatgaagaaaaaacaagcattagtttattgattcattcagcacacaggtactgaacacccttctttgccaggcactgttcaagttgccggggtcacacagagaatgaggacccaaaccctgttctcaaggtagcagatagacagcagccgtggctgcagggagggcgggcaccatttgctcaggggactggatgagagtctctcacctgacccagaaggggaaaagtaagttcagggttctagaagaattggtgcctgaattgggtgggtcataggctgtagccgggggagggtcggaagccattcctggcaaaagagcagcgtggacttggaccctgagctgaaaggggacatgaggcttcagaaaccataaggcatttggaatgatgggccatggtctctggggtaggacgggatgaatgagaggggatgctagaaaagggagcccgcccagatcctcttctgggccaccacgaagagttggaaccttatattgatggacaggatttaaagcaggaaagtaaagtgtcatgatcatatttgccctttgcaaaactcctgtgggcagttgggtagagaatggctgagaagggcaagactgggggcgggcaggcaggcaggcaggcgaactgaaataaggagacactgggagacagtgatggaaggtcgtggctgcagatggagaagggggtagatttgacagcaactgaggcagaggaatctaagacctggctgtcgaacaggggaatggagatgaggagatagaggcggctttctctgagagagggaattcctgaggatgggtgtttgggcgaaggaacattgcgctaatttagcaactttgggcgtttaggtacctgtggaacagctgggggaaggtgtgcggcaggctgcagggaggtgggggtggtgcttaagagagaggagagctgcaaaggtagccttgggagttatccagaaagaggggatggagggatgagatcatccggggagaagaggaggaggagatctggaacccggaggagccccagctttttaagaatgagctgaggaagaggagcccgccaaggagactgagaaggagcagccgagagggaggcggagggctgggagagggctggcatcacagaaactgcagaggagggttccggaaagcaaggaagatcagccacgtcgcaagtgagggaagttgaggacagcggcataaatgtccccttggatttagcgagtaggtcacccatgacttcaatgagaacagttcccatggagtggccagggcgaaggccacagcggagcaggtcacagagtgaacaggacgaggaaactggagctaagtttagacaatgccatcaagaagttcagccgaaaaagtttatgtggggagatcaaaagggaatggatttttattttttaaccatgtaatattggataggcttttttttttttttttttttttttttgagacggagtcttgctctgttgacaggctggagtgcaatatcgcgatctcagctcactgcaacctctgcctcccaagttcaagtgattctcctgcctcagcctcctgagtagctgggactacaggcacgtgctgccactcccaactaattttagtgtttttagtagagatggggtttcactgtgttggccaagatggtctggatctcttgcccttgtgatccgcctgccttggcctcccaaagtgctaggattacaggtgtaggccactgcatccagcctggatagactttttaaaaagaatttttgtgtcatggtgtaagccagaaagcataatggtgaaataaacagtgacaccacatccagctgaagaagttatggtcagctctgtttcaggcggggctgcaggcttcacctgggctgcagggtgggttcaggtctgcccagtgtgcctggcagaggggatgatggccaccagggcacaggccagcatgcaagtagaacatgggtaggaggctgcttgggttgggcacaggccctggctccatggcactagaagttgacaactaggtctggatgtgcaaagtctgcagtaagaacaggctttatagatagatatttttaaaataaagtggcccgtctgtccactggccaacaattccagggtgcctccccagggctgagctggactggcaggataggaaaaggagctgggaacccggacctccggggactcacccccagactggaaaacagttggagaatggaaaaggccaaaggcaaccaagctgtgcctgagccatgcccagggctgtgggtgtgatgcagacccctaccctaacccaccaccacttgtgccctggcactgccatgccctctcccctctgtctctgcctctccatggcctctgagaccgacagcttcccctgcgtctttacagcgttcttgaccgagagtaacaccaggccctggatgggcagggaaccaggcaagtcatggtaatactgagcaaaatgcaatctttggtgattcagaagcccttccaagtatcatggtgtgtccaggtctccatgacaacatggaagggccttatgctcagaggctcaggagagctgtgtgggagatagtctggttaacagaggccagggtactccgggtctctgatgccgcccgagatcaaatcatagggctgtgattatgaaagggaactcaactcctggaggctaacaccctttgcgacttgagttgtgcatttagctaggatctaaaggctggggatcctggactctttatcactttctagtactcgaacctcaagggataacttattctcagtgaggtccctcgaccctcaactgggaaccatccatgccctgccgcctcacaggctactgtaggaggaagagagatttatgtaaagggctttgtccactataaagtgagtctgcacacgtgggtggccgcatcctatcacgtgttggaggaaaacacgtcctgaggagttcacggctcttttttcacggtggggtgggaggggataaagtcccatccataattaaaatatgcacatttgtgtcattcagggcagtgagatgtggcagaacaaacagtatcacttttaactgtgactgggttcaaatcctgcctacttactttggccacgtgatcctgggcaaattgtgtattccttgtctgtgaagtggggctaattaatgatccatgctttgtgggctagcgtgactctgaaatgagctaatgtttgaaggcctgttattgaacccagagaaggggcttcatggatgctgtcagttgtcgctgcctgctccagtcctaaatcacccttctctccaccctgtcaccacaggtccgggctctgtttccctgtgagaagccgcctcggcccaccgagatgtcccggcaccatagccgcttcgaaagagattaccgggtgggctgggaccgccgcgaatggagcgtcaacgggacgcatgggaccaccagcatctgcagtgtcacctcgggggccggtggcggcacagccagcagcctcagcgtccggcccggcctcctgccgctgcccgtggtgccctcccggctgcccaccccggctacagctcctgctccctgcaccaccggcagcagcgaggccatcaccagcctcgtggccagctctgcgtctgcggtcaccaccaaggtaagatgtggtgtcatctctgagcaggagccggacagaggggccctgcctccctgcaggctcaggccagccccacaggctcctgtggggcagcctgtgctccacgccccgagtcctccagagtcttgtccttccaggacctgggcctggaaactgtttgcgagcattcatgcgggttttattatccatgaagtctttctctgtgactaacttgtaggaagacaagcaggtgctgaggccactcattgtcctatgccatgttgattagatgctattaatgagtgaagtaacagtggacctccaagatggcaatatggggttcctaaatagataaattgagaccatgcaagcatccctgggggtgccagtaacttgggtgtgcaagaagatactgacaagcagtaacagtcataaagggtgataaacccacactttattaaccactgggcctcgtgttctcatatccgttgtctcttctgagccttgccacagcacggtgaggtcagtacttttatcatccctgccttacagttgaggacactgaggcacagcaagggctcagtaggccttctaagggctggtccaaggctgtgggacctttctgcagaggacccaggacttgtccccacagctggcttcagggatgtcagcgccaggtcattcccgtttctttcagaagaggtggctccagccttgggaatggcaacagaggccaacctgtgttgctgaatggaatgtggaaaacagtgttgccaaggctcttgcttggccttgggctgagctcgtcctccatcgtgctggctgctcggagcccctcaggcagcctgagtcctggagggccgggcccctggccatggctgtggtaggaaggccatcggtccccatcctgcttcctcaccgagcaggggctgtgcaggctgcctttgcctctgctggccattcggagctgcctcccaggagcccccttggggcagtgtccgtgtacatgcgtgtatgtgcctgcatgcgtgtgtgtgtgcatgagtgtatgtgtgtgcacatgtgtgtgtgtctaggcttttcttttcctgctttcagaaaagttgccagagaagttaaaggcggggagccccagcccggccattgtgaggtggctgtggtgctggaaagccgcgctccaggtgtgctgcgcctttgtctcctggttttcaaaactccctttcagccctgcttcccattaataactgtgagtgttgccggccacagagcctggcagaggctgagacaatggagctattggaggctggctcggagcgcactgacatcttgctgcagtgccttattgattttattttcctgttatgaaaacaccaccccactgaggcggggagggaaagaatgttggacaggggagaggagatggaggattatttgggcacgctgcccccaggccagccaaacacattcctcccctgggcgccagcccgagcgctggtctgactcagtgacctctgcccagtagggccagccgctggacctgctggccacatctggcaggcgctctgcagggccagctgttggccatatggagaatggcagccgctggaaccgactgctcggggctccaggtgggagagagaggctgggcccggaggccgtcttgaaagtgtctgtccttttaaggatacatgcctttgtagggatggtgttgggctgctctgggggatgaagtggaggggctcggtgctggggctcccccacagggctgtgctgcctgcagagctcccgctttgctccagagtggcttgatattcaccatccttgactggcctgatcccaaaccacagccacatgagaggaagggaacccagtctcagacagaaaacaacagctggggcaaggactgggcagggtggccaggagggggagagggggcgaaagttcattcctgtgaggacagcccgctccttggcatgtcacaacagaggaactgaattctgcctccagcccggcctgtttcctgcaggggcttgtttgattccccggattaagccctggtcccttggtgcccaggagcactgggtggggggaagggaggacagcagtgctggcttcccgagcacccctggcagatttgggccacagtgccttcccgccgttctagcctggctcctgcccacccagaggcctgtcccctagcctatgtgtctgaccccgtgccaagaccacatcaactgatgggcaggcccgggcccaggtatttgcggtttccccggtcaacaatgtgggtctttactgagcaggcaagagctggctggctcttgccctcggggagctcacggctccttgtgtataacaaatctgtggcctggacagtgtgaccagatgacccaagaatgtctctccccctgaagttattggcaggggaggcctagtgcagtggctacagccagactttggagacagactgcctggatttgaattcccttctaccgcttgctatctgagtgaccctggacaggttacctaacctctctgggcgtcacttctgtaaaatgggaagaggtcgttgtacttgcgagcagagttgttgtgaggactgtgtgggttaaaacctgtgtgaagtgctcagaacaagacagaacctggcatgtggtatttcgagtctcatattggtgctgacctcctcctatcaccgctgtcactgtcatccaggtgaggcctatgggacaaggctctaccctcttagggaaaggtgttcatgtcctttttttttcttcttcagtagagatggggtttcaccatgttggccaggctggtcttgaactcctgacctcaagtgatccacccaccttggcatcccaaagtgctgggattacagacgtgaatcgccgtgcccagcctgaaaggtgttcctttctaacctcaccaagaggaaaaggcaggtcttcagataagacacagcagccaggccccaagaaagcaaggaaaggaaagagcatctcaaacctaccccttggctgggactccagatgctccgtaggcaagagggagctggggggaagaggccgtctagcgggctccagaccgagactggtaacagccaggtgaccaagggaagggagtttaaagcttttttcagctgtggcgccctttcctctagggaaagcccattgtggaaacagctgaaactgcactccagtggatggtggggtgggtgggcgaggttggccgggtagaagccaggagcagagctgtgtccgagctcaccagagtgtggggacagctgctggaatgtatccaccgggcttcctgggtgaagggtctagagccacatgtggaccagagccaccctcggaaactcagcaactgtccctgaggaaagtgactgggggactagtgtcagtactgtgaggccttagtgtcccctcttggctaggcagtgcgcagggtgaacatcacgtgccctgggggctggggcatcccatgccatcaccctccccacccagccctgtgggcctggtcaccttcccaggcaggggccggcttctgccaggctctttgggtgaggaggctggctgtgctcccagcagctggccggtgaggtgatgacaattctttctgtcactgctgccttcaggcctgagttggtttttctacttcttcatttgtctgtggcctaaagattcctcacgtgtcttgaggaaaggccagttggacaagcagactcctgggctgctgaagtacagggagggtctggtgggctcccccagccccgcaacacacactcatggctcagaccaatcagcagcctccccaggacacaagttccaagagcctaacaggagcagagtgaccacgtcctccagcccctcattctacaggtcacagtagtgaggcccaaagaaaatgtggcctgccaaggtcacccagtgagttagaatcagaaccagcctgggccagctcctcttcccactccaggctgcctggtagagcattcaccatggtaaccatgattgcagcattgttatggtaacttttccatctgctcatccacccagctgatagcaagcaagagatttcaggccagaaagtgggcacatttacctctgtggtataggtgagaaaatttaagccaaaggttatgtcaactcagcatttcaccactgctaagagcttcaagcttttgagtctgacagcactgggattgaatcctagctccgccacttagaagctgagtatgtctctgaacctcagtttctttgtctctaagaattgggaataatcatagaatcctcctcatggggatgatgtgagaactggttaaattaatatgcatagaaaagcttaaaacactacctgccatttggtaagcactcgataaaagttaattttagaaagataaaccattgactgggtctacccagttattcatacatttgcggggaaacctgtccccccctggtggttggtgctggaggctgaagaaaggtgcattggcctgtccccatcccctgtctgatgtggcatgaggtcatgctaaggaactgggatggcatcccatccctggcccaccactgtgtgtctgggctgtaaatggtcaggaccgcaggggcagggtgctcctgagaagcagaactgcgactccactgccaggcctgtttgtgggcctgaagggaagccccagtgccccacagttgctgctgcatgaaatttaaattattctcagcaaacctgcttgacagatgaaacagaaaagggacggcttcataaaatgcaattttgttcctgaaagaatggactctgcagaatcctcgctgatgtctgtgaaatgtactgggagctttttttcctagtggtcaggagcactcatgctgaaacattcccatcgtccctcagagctaagcccttgaaaataaatctagctgggaagcagagcgacttcgcctgtgtcggaggcccgagaagaaccaaaaggggctatgaaatctgcaggcttcatcgtcaacactcaaaacacccgggttttgacatttatgagcatttagggctatcggggtggatatgtgtcatcatagagacaacgctggagatgatatcttccccatgcgctccagcttctctggaggaatgctccccttgggggagatgatctgggatttccgtggggatcatgtgagtgaccgcagggccaatgtggcagcccctcctgttgtgtgcttctggggcccatgaatggagagaggatgcttttgcacagaactctcattcctcttgtattcacattgaaaatcgaaggctgccttgccgagtgggctcagttgggagaatcattcaagcccctttcaccgtgaatttccagactgcaagtgattttatccagaagactgttgctttctccatgaacaagaactgtgatttgccttgtgataaattatcagggaacaataacacattgtgagataacacaacctgtgcatgttagtactgagctaatgggttttgcctgtaccttaagtcgcaattacagtttgattgtgtattcattgacttacaacccacctgtcagtcacaaagtgtgtacaaaattgaaaaatgtcatgattttcaaagcacccatttcagagcctgcagtttgggctgagtggcccgaacttaaatttctgattaaggaggcaaaaagagggaagaagatgtattttgccacacttgtaagagacgagccttagtctgggcaaaaaaaaagtccatacacggattccaaaataaagatatcagaagacttcattgactggagccagttgtgtatgtaagttagcttttgctgcttgataatacccccaaaacctggggttttaaagccataacggttctgtggtttgactggtcagtactggtctgggctggctcagctgatctctgctaggctgtctcatttatctgtggtctgctgtaggttggctagtggctggatgatcagggttagtctcacacacctgtggttggccaactgttggccaaggtgcctcagtcctttgtggcctgtcatcctccatccagctagctcaggcttattcacctggtggtctcagggtaccaagagcagcaagagagcaaggtccatgcacagatgcttttctaacctcttcctgaggcatgtttgctaaaatcccactggccaaagcaggaggcatggccaagccagattcaaggagtgggcaaagagaccccacctcttgatgggagatactgcaacaccacattgcaaagggacaggcatctaaggttggaaagaattgtgatcatttttgcaatctacccatggagtgttcccagcatgtttgtttaggcatagtcactcacccttcagttctggccaaggctggcatgcctcaggcagaaaggattactctctcatatggcctggtatagatgtgggacactcaggacccacgtacatctatctactcagagaactggctaatgaggtttaaaagaagacacccagcaaggattgtgctgctagggaacagactgtccagttggctctcaggggatctcgcaggtacactgaccttggcttctaagttcagaagctccaatgcttgatcctgtcaccactccagggttagtgggactggaacactgctgtccccaggacatgcagaaggacatatgctaacctactgatttggaatttaaaaatcaccccaaggaggccaccttcggggactttgaccagaggctttctccctgtgaaaatccacttgggaaaacaaattctgatggggagacttcctaatgagtctgaaatcaggaaagggagcctgttacatgatgcagtattcggtaaccacagattcggacagcctagtgcctctttctccctaataggataaatcctgtgcagttccccaaaagccctcagaagggcctcttcttaaattaagttaggttttctgcaaagagcatcactcaagatgaacataaatctacttcttactcagttctaatggttttccctgtttcgtttaattactcatgttgcaattaaacaatttttttttcccttgagaaaggacagtattttagctacattatgggttaaataggctttggagaactagactgggagtctcatcaccatttataacattttttttatagggaaagtatgttccaaaatctaaacagccaaattacaaatgaactttcagaacccaacccatttgttaactaggaaccgtctgtaatgctaaaaataacttgaagaaataaacataaaaaggagagcttaatgcatctcaggatcatttatctaccatcagcccctacacagttagcttgatttcattgagggaatgtcctcaatgaaaccagactgaccctatccttgttcttcttactttcatggtacggccagccagactggcctaagccttcgaaaagcacaatgccatggggaagaggcatcgtggaagtctctgcagagaggagctgatgtaacttaatggattaccagtcagtttcaacactccatttgctgccctaaaaggaaggtttaggagaattccgtgtactgctccggctgctgtctcaactagtcgtggcatattaattttcattgtgaatctgcctctctagaacccgtaggcaagaaacctcattttcctctggtaaataaagagccctgagaactgagcagagcgagtgggccaggcatctgtatgcactcagagactgctgtcacatgcctttcctattgatggcagcaaaaatctgcatgcctagcttcccctcctctgctttctgggaaaggtgggtgaatactttgtacccttctggcactgtgaaaaggagtcccgggagctggggaatggcgcgaggtgcacgtctcaatagcagaaggccagttgtctgcacttctgtcccttgacttaaattgttggtggctgttcgttgcagtcccttaagaaaacactcttcagccacccacggggtcacccttgctagacctgctccccaaggctccagttaagtttgtggttctctgtcccctactcctgccttcctttgcccttagagggccacacagtttccccttggccccccgaccccaggttgccagcaggtagggctcttgcccggcccagttggagctgtggatggataaaggaagtcactcacattccatgttcttaatttttttcacacctgaaggggtggagactcaaaacccacctgggctccccttgtctaagacagtcggctagggtagggaatgggggaatcctgctggggtgtcccaattgctcatgctttcagatttgattgctttattttaaaaacatggatttgaatgaccgagagtcacctggggcagaaaggacaaacccatgagtccagcttcatggatggccagatccctctggagcatcccaagctggttctcttcccactggctgtgagatcagggccgcccagtgtgatgcttctctcctttgtccagagtggatctgcccagctcttccagcattcgggccagccctgcgccatggctctggtgtctctgtgattatctttgcagttctagaacagcgcctgccttgaggttgccctcaggaggcttctctggcaggacaaggggactcagcataggacagcctctttacagatgaaaacacacccagttgagggccagactgatggcgaacatgacccagattcttcacctactacttaaagtatccctacttcaggttagaagtggccctcagactggaggatggcggggaatggaggtaggaatgggggcgtgggctgagcctgcctggtgagttgattgtgccagctgcaggcagagctggagaatgagccaggcctgacaaagtgacctcgtggtctgtagtgggcattgctgcccatttgcccaacgttcattttctctccttctcccttcccagcagaacccccattctgttccaggtatccaccacctcgcaggctcagagaaaagtgaaccccagcccctgccgagaatatgattctggccaggcatggtgatcgtgctcccctcccagtcattagtttaggaaagggtcatgtgaggcagttctggaatagaatatgagggtaatcctgcctggggcttctggaaaaggtttccttgcttttaaggaagagtcacaagaaaaaaagtcatccttctccctccagacattgtcgtgactggatatgttgccttgaactgctataaccttcctactacaagcctgaggatgaagccagcacatgagcagtggagaaaacaagagagttccagatatactgaaccagagccttggtactgctttgctctaggcttcttgtgtgagccaatacattttctagttgtgtgaaaaagaaataaaaaacaaccgcctccattgcacagacggctcccaagcaacagccgtgggtgcctcctctctctcctagacctcaccaggcatgtcagtttgctaaaagcagctgcagtgaccttcgtgagtaccctgtcctattattcattcatcccggcactcgctgctgcatacagggatcctgctatctgttgcttctctgaatgtcaacaccaggacacagcttagtaccaccacactcctgtgtgtcagcgggtctgtgtttctgtctgagggaaatccactaacacactggtacgtgagccaggaggtcactggagagcgtcaccccaccacccactttagccacgctgaaattcccaaacaggaagatctctcatgccctagggcctttgcacctgccactccgtcttcctagcattgtcatttcctctctttcctgcccacaaaaactcctgttcatcctacaactgagagcctaaaggttaccaccccctgtgatgggaaaacattttttgctattgtttctcttgttcctataataatttttgcttacgttcctattataatacatgaatattatgtgaaacttacccatttatttatttgtctccttatgaggcagcgaactctgtaaaagtcagctgcccgtgatgcccagtctatagaggctctcaatatgtgtttgaggacagaatgaatggattaatatatatgaatatttattaatttatttagccactattgttgggttagggaagatgaatcctttgacatcatctcaacttacctactacctgagagaagatagtggagcagcctccaaaaacagtgatttcttttttttttttttttttgagacggagtctcgctctgtcacccaggctggagtgcagtggcacgatctcagctcactgcaagctctgcttcccgggttcacaccattcttctgcctcagcctcctgagtagctgggactacaggcacccgcctccgcgcctggctaattttttatatttttagtagagacggggtttcaccatggtctcgatctcctgacctcgtgatccgcccgcctcggcctcccaaagtgctgggattacaggcgtgagccaccgcgcccggcccaaaaacagtaatttctgtgggtgccgtgatgaggatgatgaagacgtaaccccgtggtgagctagcatgaagcctcacgggttcgtagttgggcctgagcccggatgatgaagctgtgtcgggggcgcagattttacatcattggagcttttgctgcagttactgtgcccttcccatctctcctggagcatttgcagtcacagtatcacagccttttccttcaaatatttgcatcttctcaagattttactctgacttgcctgtaattctctgcagctttttgcatttatttattttatttaaggcactcatctagtaattactttgttgcaggcactgttctaagtactttaccaatgtgaactttttaaatcctcattataactctccgagtaattattattagcaccacttcagagatgagaaagactaaggaacttgccccagatcactcagcagagtgggattcatcacctagagctctgggtaggcccagtccaggacaaccctggtgaaattggttggatgagcagctggctgcgtacaggttcgaggcatatccttccctagtgctggcgacacgaccggaaggtgcagccacagactccccacagaacagttttgctcatcagggtttgaaacaaccaacaaatgtcaggatcaaaaggtacaaggatcgcatggtccagccccagacctcataaacagccagctgcagtcctcttcattttttgtctgatcaggcgaccgtttttccttaacagccaggtggggtggtacagatagcactccggtgcatgatgcttggggaccgttgggccttaaagccccggcctctctttctttctgagggtttcttgttttgcccccaagacatagtgcatggccagtgtttgcactccagcccccgctttcagaggtgttggcccagttccttcgcagaagggcagtcacggccatcaggaccatctgcaggtgttgctgggcaggccttgaatatatccaagctcagggaagcagctccctcttgctggtccctcggtcgttcttggtggatttgaacctgggctgggaagtgggggtgcagcagaatcattggcaggatgtttgtgtatgttgggggcagagcagccacgatttgccactgtcttccctgtgagctcagcgccactttggaggaggagagggaagaaggaaaaggtcactgtggttatggttttcatctcaagccctgttcccatgagatctttcctgggatggagaaggagagaccctatttgagggggctgctaggagtgatgaaaagcaccctaggctggagtcaggaggtggcggtcaggacccatgttcgtacttgaccggctgaatgactttaaggtggaacgccgaagctctctgagactgtttccttatctacaagctgtgcacaagaatgtccacctcaccgggctgttgtggggtctaaatgaaacagctgggtgaacgcgctttattaaaataaatgccctggttcgtggagacaaaaggtaggttagaggttaccagtggctggcgtggagggaagggacagggaggttttgcttaatgggtagagtttctgtttgggatgatacaaaagctttggaaatagtggtgacagtcacatggcactgtgactgcagtgaatgccactaaactgtacgcttgaaaatggggaaaatggcaaattttatgttagcatattttaccacagtggaaaagaaagaaaactcaaagaataatgaatgaatgaatacccaccatgggaagagagaagcaatgtctgagcataaattcagggacagctgacccaccacgccatttccttgatgaagagaaatgggggtgtcggtcacagggagcagaacagaagcccatcagatgatgggtcttcatgcagaccagtgtgtgctgggccggttacaaggaaggactcctgaggaatgggtgggagggtggcccagcccccagggaaggttcctgggaaaatgtggagtcagcacggctgaggacccccatcaggactcaccaggtaacctgatctgggtagacagcctctcccctctcccatttgctcctcccccaacagcagcagctctgcaggctcggagctgcctggccggccgcaagtttactgccaagcacagtgggcgggtcaggcccttaagaaagagggttgtggtggacaccagagccgtggaggagcgtttttgtggtccatttctctagcaccccagagagcggagccgaaggtgaggccttagctatccatattcagaggcaggttatatgtctcaccagcatcaagcccaccagagcccagctctgggctagaaatatgcgcctggcacaagtgtacactttaaccctgtgcagtcagcaaccattctaagaagcaagtctggactgccagccagccaggacctaggatgtgtccttggggttgctgccagcatcatcattgtcattgtcaccatcactgacatttattgagtgctcactgggaaccagccacggctccaagtgtttttgcctgtgaaccctccccagtctcacaattgcatgaggttggggccgtaactatcctcattaaataaccttgggaggtggtatcatgcccagggtcacagaaccccagaactgggttcacggcctttttatgatgctgctggcaatgtggagacacaggcctgcctcagggcagaaacagcccctgctttgaaggtgagtttgatcctgagaagaaagtgatagaggaggagagagagaggggaaaagatgcaggccccagcagctcacccaccggagctccagaacctgcccactccacccggcgcaggaacctccacccagccaggagcacagagcctggcagatagactccctggtggatgccagagcaatggggagcacgtttgtggtcaattcctctagcacccgcaagagctgggctgaaagtgaggcctcagctatactgcgtcaccatcgcctcttccattagaaatatgctgaggggggccgcgcccagtggctcacgcctggagtcccaacaccttgggaggccgaggcgggtggatcacctgaggtcaggagtttgagaccagcctgaccaacatagtgaaacgccgtctctagtaaaaatgtgaaaattagctgggcgtggtggctggcacctgtaatctcagctgcttgggaggctgaagcaggagaatcgcttgaacccaggaggcagaggttgcagtgagccaagatagcaccattgcactccagcctgggcaacagagcaagactctatctcaaaaaaaaaaaaaaaaaaaacgaaatatgctgagcgtgtgagttttattcttccacgatattaggctgaggagatgatattgagcaaaatatattgtacccataactcatattaatgggaattcaatagtggcaacttgtcatctgctgagattagaagggaacgttatgaatattgtgttataatgacattaaaaaggcgttctgaattaggttccatgtaccacatcgggttccttgtaaataattgaggaagaaactggtgcttggaatttgggattatccatttttgagatcccagcagttccctcaccgggctgatggggccccattgatctgaccactcaccggaccacaggggaagtctgcatctggcacggccgatggctttgtaaaatgagcaccgagcagaaattagtaaccgccgcgtccagcaatggactgtgcgtttttcctccaaaatcttcccaagtccagatattctgtgtccctcgcctccagtcgctggaactctggtggcatctgagttggcagcagccttcccaccaccactcacacccacctctggccccctcagtggcaaagacttgagccttgatagacccgcggtcagatagtcagtcaggcaccagcagctttgtccctggtggaagagccagggtgtccggccaccacccatcttcaggtgggcttttcagtcctgctgtcctgtcctgaaggactccaccacctgctggctgtgcctccagatcctcaaggccccaggatggaaggcagcctggagcttcacaggcggccccactgcagtgcgtcttctttagttcagacctggtgtctccacgtggctccatgaaagaccagtaggagccagtgcagtcgctcacgcctataatcccagcactttgggaggccgaggtgggcggatcacctgaggtcaggagttcgagaccagcctggccaacatggtgaaacccccttctctactaaaaatacacgaaatagccgggcatggtggtatgagtctttaatctcagctgctcgggatgctgaggcaggagaatcgcctgaacccaggaggcggaggttgcagtgagctgagattgctccattgcactccagcctgggcaacagagcaggactctctaaataaaaggggggtggggccatgcgcggtggctcacacctgtaatctcaacacttcgggaggctgaggcgggtgggtcacctgagatcaggacttcaagaccagcctggcaaacatggcgaaacccctgtctctactaaaaatacaaaaattagctgggcgtggtgttgggcacctgtaatcccagctactctggaggctgaggcaagagaattgcttgaacctgggaggcagaggttgcagtgagccaggatcatgccactgcactccagcctgggtgactagagcgaaacttcatctcaaaaaaaaaaaaaagaaaagaaagatcagtagggcttcctggccagagtcaggtctgtcatttagttatcaaagcccagaacttggcttggagcgggggtggctgcctccaaggaaaatctgaaaggagagtagggcagaagcaggcagatgctcatcctgtctctgttcggaatgcccttgagatctgaccctgtgccatcgagggactccaggagcagaagaaagcttcctgtgaccatggccgacctcgtgggccattctgaagccactgagcatcagtaaattatgcgattcctccctatcattggagtgttgtttgtccctggatttccagtttgacttctgtcctatggcatgcctgagggtgccaagagacaggaagaagctgttgtgatttgagaggcagtcagggccaagaggtttctctgcatgcaggtgaaaccgtcagtcgcttagccaaccacattaatcctagctggggtaccattgcacaccagcaacataagtacttaacacacctcttggcctgcacagcgatgggattaggagcccagactctagattcaaactgtccaagattgcatccggactctcccactttctaactgtgtgaccttagcaagttgcttaccctctcagaacattggtttcctcttctataaaatgagagaataatactatccatttcattggcttgtggggaaaattaaatgaattaataatacaaagcacttacatcagtgtctggcatccagagcagactctgtaagcatgatctgttattattaccatcgtcttcattgtgtgacctcctcctctctgcctgtctctttccctctagaatgaaggtccttgagacaaaagacctgtcctcttaggttctgcattgctggcacctcccgcttgcctgttatgtgctcagtaaatatgtgttgaattatcaagttgaattgtgggtagaaggtgtagtcatggaaatccactcgctttactgaaaaacagctgtgcacttttgaaaattatatttcttttccacggtcgtatattctcatttcagaggagccccgtggctgcctctcatcctttgtgtggcaggcatctcggcaatagtactcaacagtctacagatcaattagacatgtattggcatgcatgtagcacctcgctaattaaaggaatcccaaagtcaggcattttgcagagcacttgctgtgcctccatgaaatgggaaatcatcgcctctatctgatgttctcaagcccagaacccgtgcccccgccagtcctggactccggctcccgttctgtttgttggtggttgtggttatggttgtttttgttgtcattgttcttttgttttttaagccatttgtggagggccaggccctgtgccaagagctttccatgttttgtctccattcttagagcaaccccatgtggtaagtctacagttctgcccatttacacacaaggaaactgagttttggaaagcctgagaacttgctcaatgcgctagctcatacgtggtattatggaaacggggcttgaactcagaccttttttacttcgaagcctgtgactctaactcccagttcttttccccagatgtctgcccttaggtatctgccagaacctcagatataaaattcccagaatggagctccatatcctcagcctcaaagctgtgccttcttctgcatgcctggctcagggctcaggtttcccgcccacccagcaggtgcagccacatgactcttccctccctcgccatcctcattactacccatcagtgagctgaggtccaccttagtagatttctggagtctacccttttccctccagtcccacttccactgccatagtccaggcccatcatatctcacttgaggggacagaaattgcctcttctagcttcctgcctccaatctgcccactctgtcacatccatccttttttttctaaatgtgcagttactccatacttgccctgaaggaaaagtggcttaagacccttggcgatcccacctcttctggcttcaccaagcctcatctgtcacctctgcacccccgcccccatgggtcttacatttcagccaaatatcagctgcatgccccaaccctgatgcgggtgagttcagctggagcatgtgtgagtgacccctggttctgcgccaggcagaacacaaatcagaaggaactctggccttaaagacaggcagccttgggttcattccactggtaagctgcttaaccattgtgtggcctctttttcctcatctataaaatggagataacaacagtactgccttaaaagaaattccacgtaaaaaatctagaccaggccgggcgcggtggctcacgcctgtaatcccagcactttgggaagctgaggcgggccgatcacgaggtcaggagatcaagaccatcctggctaacatggtgaaaccctgtctctactaaaaatacaaaaaaagctagccgggcatggtggcaggcgcctgtagtcccagctactctggaggctgaggcaggagaatggcgtgaacccaggaggcagagcttgcagtgagccgagatcacgccactgcactccagcctgggtgacagagtgagactctgtctcataaaaaagatctagcccattaggccaggcgcggtggctcacacctgtaatcccagtgctttaggaggccgaggcaggtggatcacaaggtcaagagatcaagaccatcctggccaacatggtgaaaccttgtctctactaagaatacaaaaaattagcttagcgtggtggcaggcgcctgtagtcctagctactcaggaggctgaggcaacaggattgcttgaacccaggaggaggaggttgcagtgagccgagatcacgccactgcactccagcctgggtgacagagtgagactccgtctcataaaaaaaatctagcccattaggccaggcgcggtggctcacacctgtaatcccagtgctttaggaggccgaggcaggtggatcacaaggtcaagagatcaagaccatcctggccaacatggtgaaaccttgtctctactaagaatacaaaaaattagcttagcgtggtggcaggcgcctgtagtcctagctactcaggaggctgaggcaacaggattgcttgaacccaggaggaggaggttgcagtgagccgagatcacgccactgcactccagcctggtgacacagcaagactgtgtctcaaaaaattaaaaataaaatctagcccattctaagcaaacagtaagtgcccaataaatgctggtgatcatagtgaaatacaaattctgtcttaagaataaattcctggaggcttattttttttttaaagaaatagactcacatccgagaaaataaggagtgtagcatttaaacaatgacatcttctggtttctccatgttcttctgaggaagtcagacaccccttgcaccgtggcatggcttgagtacacttgagcatctccatgtatatgattggtcctcctttccagtccccactccccacccggtcttccttcccaccgttttgaacatcacatggattctctttcatgtattcattcaacaaatactcatgctttgttaacttaggaggttctatggctcagctggttgaggatgaacctctgggaaggcagcttccctaatgtcaatgactccacttgcgatggagtgtgcgctgagtcccaggcggtgactcctgatccgccttccactgtggccacgcacacctggtactgcattgtgctggggctttttaaaaacttttaggctggaggcagtggctcacgcctataatcccagcactttgggaggccgaggtgggcggatcacttgaggtcaggagttcaagaccagcctggccaacatggtgaaaccccatctctactaaaaatacaaaaaaagtagccgggcgtggtagtgcgtacctgtaatcccagctacttgggaggctgaggcaggagaatcgcttgaacccgggaggtggaggttgcagtgagccaagaccacaccattgcactccagcctgggcaacaagaatgaaactctgcctcaaaaaaaaaaaaaaaaaacttttatttgaggttcagggttcattgtgccgtttttaagtgctggtgttcaccttctaagctccacctttgaaaaactctcccacaacacaaccactcatcaagtgggttgctttctgattaccttgagggtagtttgtcctccagccttctccatctgagtccaaccctctggctgctccagctttgtggcctcagataccacgccagggtctaggagcaaaggcagtgctcaggggcaaaacagctcctatcagcctcacgcctccagtgactcccagcgccaatagttttctcatcagggcaggccacaaaatgaagaagaaaaatctttctcgaatggaaaaatagggctgctgctgttttatggtggtgtgctttatggttttcaaacattttaattagtttcattttttaatataaatgcaccctgatgttttgtgcaggaagggctccattcttaaaatctcagaaataaagtaggaaaatgacagattggctattaaagcgtcacactcagatgtattattattattattgttatttaacatttctgaatgccaacactgagccagaagtgggggtggaggatggggatggtgagaagatccggggacccctatgactcagggtcctggtgtcaggggtcccgggggcttggcagttgctttctcagcctcctgagattgtcctgcccctccaggaacttcacaagatgccagtcatctggtttataggctgaagagacaactgggttgcctaggctttgtgttccaaccctgttcttggctcacctgtgaacttgctacaatttcccagttccactccccatcccatccaggtagggatttaagctatatttcagggtggtaaggtgggccacttccaaaggaacccatctcttcttgaaaacattcaaactgatgagaaagcagaattttactttcagggcactccccatgtagtaggttaaatagtaccccaccccccagccaaatatatgtccacccagaatatctaaacgtgaccttgtttggaaatagggtctttgcagaggtaactaaagtaaggctcaagatgagaccatctagattggggtgggccctaaatccaatgacgagtgtttttacaagagaacagagaaggagatttgacaacacagagaaggccacgtgaagacggagcagagatgaatgatgccaccataaagcaaggaatgcctggagccaccagaactggaagaggcaaaggaccctcccctggagcatccagagggggtgtggccctgctgacagcttcacttcagacttcggacctcccaaactgtgagaagggacctttctgtcctgtaagccacccactgtgtggtcgtttgttgccgcagccccagaaaaatgataccccatggacaccccatggaagggtctcttcctagcatctccttcaagaaggtccatccgcgtgggactggatttttgcaaaacatgctcttgatgctgtgagtttaatccaggagcagcaggctgacctgctgacctcgtctctgctgagttgaaatgaaacaccatcacaccttcttccttggtgtcgaaaaatgtttctacaagcttcctaatgatcacctgcctgcttcctataacatatggactccaatttggaaaagtttcaaagggcgattaaagcgagaagctctagtactcccatgtccctctcagaagggaaggagctgggtgcgtcatttacgtgcagtggtgtctccaaggaggggcagacttgtgagtaggatcagacactcgatgtggcctccatttaaagggagccgacattgggactcttacgtagctggagtaagaaaatggaaacagacgtgctgtactggttataaccctcacagaaagctcttgatcagactcagagagcatcagggaaattctttaaatcaaaaaaccacataagccaaataaaagctccaagccccaaccactcccctcttctcacagactttaattcagaagaaaattctctttgctgccatctctgctcctctttatcttgttgtaattgaaaggagaaaaagtgggcagattcatggactcggacactccttcccgttaaagactgtgctttgactgtgttattgccagcaggtcattttatagaattccaggaaggaactggttccagtgatccacggtgggccttctagagacagaagggctccacaaacccacctgcctggaggaaactatacccaaatgtcagccgaggcttatgggcctattttagaagatgagcgatccccaggcaggctccagccggcctcccaggtctgtgccgtgtttttctccagctgctcccctgggcctgggtatgaaattagatggcagcccactgtttacccagctgttgctggtgcccagagcccataccggggcaggcggcggtgctgctcaaaggatatttattccttaaccgcccagggactgggggcagagctgcgtaccctgctcctggaaacaggcaccctcctcccagcttcgccctctggggattagaatggcagaaactctgggactagggaggatccaaatttggaaagtattggctctgcccagcggtgttcatgctcgtaatttacgtcttggaagtgatttaataacttgagtttaatttctttggaggaacatggcaacagcctgagctcatcacgtccctccaagcctttggcgacattgtaatcccaaactggcagtgctggagaaagtgcctagacttactctgggcacagaggctggggcggaggggggcggtgcccatgagggacagaggaagtcaagaggcccagcactttgtctaggaagttttactcagcctttattttattttatttattattatttcttgttttgagacagagtcttgctatgttgcccaggccggagtgcaataacacgatttcagctcactgcaacttccgcctcccaggttcaagcggttctcctgcctcagcctcctgagtagctgggattacaggcgcctgccaccatgcccagctaatttttgtatttttagtggagaaggggtttcgccatgttggctaggctggtctcgagctcctgactcaggtgatccacccaccttggcctcccaaagtgctgggattacaggcatgaaccaccaccgccagcctactcagtctttaaaataaggagattatgcagaagacacagaccgtagtaccagaccccaagagcaggaaacggctgtcagattgggtacacacccgagtgggctgaatgaacaggctctgtcggcctaatctgcaagtgactgctcgccaagaaaccacacctgtaaaggttagggcagtactcccacgtgctcggcaacatggcagctgaaatcggtataagaaaggagatggattacaggaggtggaatccgttactgaaagattcttggagtctagcggtgatagctgcagctcactgctaaccgggagatttatgtgacaagattatcaatggtattaagcacatttagaagagaggattatacctactcctgggtcagttctgtgccaccaggccctgttctggccagcgtgttaacagatggactgccggctgcatgaaggtgaagctaaacatttgcacagtcacgagaagaggggaggctcagatgatgagttcattgctgggtggctaagttcaaatccaagggaaggatctggttttgggtctctgccaaatcctaggaaagatctatttccacctcctccctttctgccccccaggctccccaccaccatgcccacccctgccagcctgcccagatttttggcttggtgaactccctcaccaaggggaggggacccatatgtaactagaagcaggagggcggtgtcggaggctccaaggggtgataggaaggaaacagtgccaagcccaccagccgccctcccagaaacgaacttccaagcaatagcagactctgctccagagaaggagaagcactttatttgctctaccaccggggagagtttaaaattagaccaggcgaagctcaggaggatatgctgttgggagcagttctggtggcctttggaagggttggctgggatgtggctgatgggcttttttcattcccaatgtttaagcctagcctggagccaggactatgcagaacgagagcacacagaaggcctctggggaggcttaactatctagggacacctctcagccctgtgtcaggaattgttgcagaacccttgaagtaagcagagcttaaatggagtgtgacctcagaaaatgctacttaaaaaaaattgtggtaagcgatacataaaataaaatttgccattttaaagtgtacaattcaggggtgttttgtacattcctaaggctgtgggaccatcaccactatctagttccagaatgtctttatcaccccaaaaggaatccccatacccattaagagcagcctcccccccattccttctacctaaaagcattactttttttttttttttttttttttgagacggactcttgtccaggctggagtgcaatagcgtggtctcagctcactgcaacctccatgtcctgggttcaagcaatccttctgcctcagcctcccaagtagctgggattacaggcacctgccaccatgcccggctaatttttgtattttttagtagagatggggtttcaccatgttggccaagctggtcttgaactcctgacctcaggtgatccgtccacctgggcctcccaaagtgctgggattacaggcatgagccaccgcgcccggccagcgttactttttaaagtaaggatcgggggatgacctcaggaaacgtccatttagctgatgttggggagggagaagcccttgtgcttgagcttagcccctccttggtgcccctcagcctcgagagggctgcctgcccctctcccttagcacacgccgcattgtagttagttgtctaaatgctctcttccccccacgggcactgccagtgtctgattcctctctgtgaccccagctcctaaaacagcagggagtatctcgcaagcctcagcgacatttgttggccggaaggatataaaaaccagtcattcagtagctgatgtgctccgtcttattgttgggggatataactctttgtcccagagttgtcatacttttgatccctgcacagaaagaagcaaacccagagtaggaagaacaggcctttcatgtcgctccttttaattagacgccctgttaaattgcagcaattttgcactgtggttccctctcagcgtgtcgagaagctctgaagacgctcttaaccaaggaagccaggagttcattttattcttttcctccttattttcttccaaaggccaatttacttttttttttttggacattttgctttttgccggtgctgttcgttgatatttgtgtatataacaatgctcctttcataaaggaggtgagcgtggtggagtggaatcctcagggccccccactaatcacttttgatggagtaagacttggagaatcaatgattttgccttagagtcagaggaaatttgctgttctcaagccctcgtacatggaaatataagccaccaggagagcccagcctcccccgggctacccgagtcccccctccactgcctggcaggagctggaaagatcaaagggacagatgacagtgcttggcgcccatttgtcactccattggagggaaccagttgcagtgttaacagtcaggcctggtcccatgtttcatgaatatttgagaatgtttgctggcagaattctaactgcgctgtgtcctccacggcgtacgtgtcacccatattccagagcctaatcggagctctgggggaaggaagcaccacttctccattagattcctttattatcctaaaacatgcctgctaagcggttccgtgtctggggtctaaagtccgtgtggtccttctcattcttgctcctccaagaatcctgacgcatgggcagggaaagtgttttattgttatggactaataatttagaggctagggaaggaatggccttgtgtgctggcctcgttgtaacaatttttctcatgtgtcttccagcctgttcatctgtcgcgtttatttctaaaaagtcctctcacctgccctctgctgtcctcagatcccatccacggccctcacctccctcatccttctctgtaacctctgacaattctggatgacctggtccccgccatgcactttgggcttgcccctgccctgtgagtagcctgacaaccctgcacacacccctggggtggtgccagtgcctgctcctcctcctggcctccctgccacccagcccggcatgaagctgaacatcgagtgggccccaggagagaggctgagttggtatggccaggactctcccttggcccagtgggaaggtgcacctgcccacttgggagcaggcctcagcacccctcaccagtttcaggttgcccactctcaacagcagctaagtcagagctccgagggctgctccccacccaccttcagcctcccaggcctccccttgcccgcctgggccctggagacacatgcttcagccacaggcaagtctgtttcccttccatggggttttctccacaccacagcagtggtacctctgggcttctctccctggcccctgccccaaggagcccagatccagtgtggtgcttcttagactgtggtctgaggcctcctgcttatagaacaggcagattcccagacattgcctctcccctaaccaaagtttattgattctgagtctctagggctgtggcctatatttgcatttttaacaatctccctcgggactttttatgcactgagatttgaggccagggttgttctaggctgtaccggcaggtggactggaggccacagagaagaggcagagtgaaattgtgccgggcctggcttggagcacccaccagcccccggaagacaagtctcacccagagctctccggttaagcctgccgagagagaggcaccaggaggcaatctccacactctcagacaccagccgtacccaaagattgatgatttcagacaccgggcctcccggccacatcctcactgcctcactcacgcgtcacaccatagctcttggtttatgtgtttgtctcctggttacacgtgtgttcctcgagccccaggatgcgtcttattcattcttctctccacccgcccactggggtttgatatgttgaagttgctcaataaatgtctgtgaatttaatataatcaaatggctgaattgaggcagaaatgagccaggcggcctttgcgccccgttcctgggcttgtgccttgcctgcaggaatggagaaaggcctggcctgcctacacttcccctggtgaaggaaatattgattttgctgtttgttttgcaaggaagctgtccccactgggacagccagatctagagcacatgaaatggaaactccgaagaaggcagtgcgctggcagctggtctattaatagggcggcctgggtgtgtccaggtggaggcggccctgggcctgtggggcacccttggagctgtggccttggggaccagggttatcccggaatcccgccacccacccacctcggtttagctccactccacactgctgtggagatgtgaaacgtggcaaagtcatttgcaggttgccttttcagtgggagccaagttgagcggccttggccccaggaccccagagaagatctcctgccacccctgttggctagaacacaagggtcagcagacagaaagcccatttgggacctgcagagaagtaggcttttcctctctgcctcagaggaaaatctgagttgagcaaacagtccaactcagcagccatctggatgttacatggtccagaagctaaatccagcactctggttactcagaacaattctctcaggagccttcccaaatttgggactcagtgacctttaaagggggtgctagttctgtaagcacagggcaggtgaggctgccatgtacagctgtacaagctgtgcactgaacaactgtcaacgtctattctgggtcctgccatattgtgataacttgcaaaggcatgcagctggcatcctgggagagcccagccagcccttccaaagggaggctgcctaaagaccaggaaatggagcagccagctgtgctggaaggcccagtgttcagacacctcactttacagacaaaagcagaggcctagagagggaagggagacgttcaaggtcacacagcatctatggaagagccaactgcatggctgggcttcctggccccaagcccgctcctgccccttgcccgcttttcttctgttgtattcctctgatactctctctgccctgggaccagggagggatgcagctttgaaagaagcacacattctgaagtttttttgcctctgcccaagcagagttctagcttctggttttctcgaaggccctcggtcgggcaggtccttctccctgctgtttgttccagctcagacctatatgttttgtccatttcacgctccacctcctgctctccccagattgtttcctgtaggttttgtttttgcatctgcccctgccaaagtatgtgggttgacgtggaagacctgaacactctgggagcctttgaagcaaggatggatttattcctttcaggccacagacgccatgccgaggccctggttcccctccagacctgtgcgaggtcctgagcatggcccagtgcatgctaaaatccccacccacacacagaggctgcggatccatccccgaacttcaggggcagcttctgaagtccaggccacctagaaccagggtccctagctccccttctggaacccaatcccctacatggcccaggacccaagcaaggcagggagagtgcgccgtgagtcagcagcagatcaagtggtcgtttattcagcagcgatggcagccagaggcccacatccatgcattcattcactccatagataagtgtttatttaggatctaccgtgtgcctgtgctgaagtgagaggccctgatcgccacagacgtccctgccgctgggagctcacatgctaatgggtgaaagccgatgacaaaataagtcaggaaatctcagatggcccaacgacccccctgagaaataaagcaggaaaagaagtctgagaaataaagcaggaaaagaagtccgagagcgccaggccggaaggtggggagcgctgcgactttaaacagcacactcaggggactctgagcaaagacctggcaaggtgaggggcagccatgtgggtatctggacaagcatgttgaggccaggggtgaaaaggagcaacggccctgagggaggggtgaggaacagacaagaggccggtgcccttggggcaatttagctgtatctctccggctgccctgcagactaaacaggacaaggaaagagccaggacacagtccgcaggctcctgtgtcctgtcccgtcccaggccagccctctctgtgctcctgagccacatgacagctgcttcctgggcagagccttgggcgtccacagcacttcagactcacttcttcccccacgtgactcttcacatctcagcctccccctgggtttcctgatgtggagcccccatcccaacccccatgttcccatccgcatgtccctgactcctcctgctccttaccccccacagccagtgactactctaggtctgtccattctgttgttaaacctctccactgtccatcctgtcactgcgtctgctcggccaccgtgctggccaaggtcctcgcccggtctcctctggactgctgtaaaacctcccatgggtctccagcactccatcctgtccctccagcctgccctctctaccctccagagacccccatccacaatcaagatagaactcgccttcctcgtcgcgttccaacctcatctgctgcccacacccacccgcccctcagggcagcccccctgggagcggtgcacattctcatgctgctcgtttcagcttctgccctcactccttcctcttcctttatctccagaaacctggtcctaaccatctctttcctgaagtctttcttgccaagcccgtttagcctcagagcagctccccttaggactgccaaacaggcatctgccgtgacttggagcacggaaggttttcagcaaatgtttgttgaatgagtgaatgatgggcttttcttgagcacctactggaagcgggctgcacccactcactgctgtggaaattagagaccctctggaggggcccatcctcatcagtggttggtggccccagctggcctgcagcagcagtggcattcacaaagggagccagccaggggcacaggagcacgtcagaagcccggccatcaggctggtgaccccggctccagggccccattagtcccaggggtgccgattcccatcctgagcccctggttgcccacccaaagctccaggccactctgaccctaagacccaggagtcctagaggctgagccctgctgtctctgagctctgcttcctggagctgttatttgtgtcctggggcagctgctcgggaacattctgacctgggagccaagcagggacctagcagttgagctgcccagagagaggctcagggtccacatggccgcaggccgggggcctctccaggagcacagagatgtgtgcaggccctgccaggctggctgcagcctgggtctcctctgaagtcagccctgctttggggtcgcatggaatttttagtgcaaagcaagaatccatcctctttccatagtagacctgacagggatgtggcttatctgcccaaaagagagggaagaaccaagagcttgcaatgaccttgctccttctcagggacagccaagaggacaagattctttatgaatctgttgaagcaaacagaccatctcctggcccccaaaggggaatggaagtcccggtgaccttctgcaggtaagctggtgtcccctccctgcaggcacgttggtccaggaactttacacttgacccaaaagcctctcttgagagatttccaccatttggttttgtaggtctttaagacttttcccagctaccccactggtcttctcagggcttcattgttctctgctcgagtgctgtggtttgtgtccaccgtggagtcatgcagaaattagcaagcaggagcgggtggggatattgaggtcctagataagttgaagtagactagagatgtcctttgggaagggggccaccccagctcccgggagtccttgggctggaggttgtcaagcaggctggagaaagaacatctttgtcaccagcgtgcctcctctggtggcttgttgactgtccaggacttctaatgtgatcctgaggctcaaaaatgaagaaaatcagtcactgatcccaatgttttatttactaaccctgtggatgcttgggagcattcagacactggaaggtttgggttggatttttcacattcttttctgtgtggaagagtgggggtggtcatacaagaggggtgaaaacagggcctgcggtgaatagctgcacagcccttttactctccccaagcccggtctccaggcctatgtgtctaacagatgcatctattcagtgcatctgtttggtgctggtgcttctgggtccccttggacagcagaatgtgtatgggtctccctttcctgtggggtggttcctctcaccactcctttggggcagtggtgcggaggagaagtgatggaaggacgtcagacccctcggggaacgtggggtcaggaccagggtggtccagggagcctgctcccatctactgtgccttgacacctaaaacccagctgtgaaatgcagtgtcttcacctcggaaagccctcccaggggctgcccttacagtttagatatctcagcctgcacagctccaaggcagtgaattctaagggaggaccctcattttacacataagaggtgggagggccagggcaccctgtggccaggcgtgtcgcctacgtgcttgttgtccacaagcttttccttcagggcccctccctccctgattacacagagcccgggcctgggagaagggtctgatcatttccctgccatgtcttctctgtgagcccttgtgcctcagtttccctgcctatcaaacaggaataaccatctcttcctcgtccacttcacaaggtagttatgagactgaaatgaaaggctgggtgtggcagcccttggaggaggggatttaatgacaggggtgtcgaggagttgattatacagcagaggtgggaaggttctgttttctctgcctggcgcgttgccttgtttaccagaccggccttatttgggagtgctccggggagtcgctggcttcatggaacatgcagcgatttcatggtaaagccgggcactcagaggtggaggtgtcaccatctggaaccaattcgcgttttcctgaagtctgaggcgcccgcagacttcctgcccggctcctccgggctctggaatggctcccacctggacccaagaccagggacatttcgttcctcctggattgttctaatcccagacactcaggagctcacccccggccaacaccagtgcccttcttcgctgacttcttttcaccgtgtttctgtaaacacattaaaaatggccttcctgcatttcaattctccatctctcctgccgttttctctgtcccctgatttcagcctccaggattgaaattctttctcctggtctccatgaggaattggtgaaacagaaaaagcaggaaattaatgtcccagcctccaggctccacaaagcattagatggaattaaagtagaataatgagtcaatgcacacacaactctgttgttctttgacttttcctttcaaaattcatgtagtgaatgctgctcccattctacatcatcttgggctgggagacacactagtgtcctgaatgaatttacataccaaatgggttttaattttatatttttgcttaaggtcaggacatttatttattatcattatttattactgaagcacgagtggttttaattattttagtgttcctcctacaaagcaggatagctgctagctacagaccattttccgtttccgctcacataaataatatagtttttaatttcatgaagatttagtattcgtgtgctttgtaaattaaagtcatcgtttaccacaacagagacggagtgtttggaatatcctggtggacttctctgtccatttctggaggatcacttttcctaactttggttctctgttgcaggcgcccagaaagaggcacccgcagagggcctgggaagggaaggggctgtggggtgtgggaagtggctgtggggtgtggaaaggagaggggaaggaacccttctttcctgcaacgtcatttgcctttccatgtattataatcctatcccgtttctcccacaaaaccctaccaaagccagcatttttgtctctgttttacagagaagggaactgaggtcccagcatgttaactaacttgcccaagatcactcaaacccaagtgacaggttcaaatgctgatattcctgacccaaggcatagccctttgttctcctacctgccctctctgtgccaaggcttgggaaggtgggcagatgtctctgcacaggcctggggctggacactggcagaggtacagtcagcagtagaaggatgagagatggacgcagagaaggagtgggcaggaagggtggcaggcagcgggcactgccaggctgtggtgtgactgtgtgggtgcaagtagaggggagcagtgtcctggtcacttggggggcagaggacgtgacctcctaggaggcagtgtccccaacacacagccaggggactccatctggacaccctggagccaccaaatcttgcagactgccctctgcaggtcctcctccatcccttcccatgctgtctctccaccaggatcccagctctcccagggtggctgctaggccagtgaattgtgagctccccacgcaagcagcatgccccttccagacaccatgactccctgtctgtaaatcactctcctgcatccccatcccatccccagctagtcctgggcgggcttcttcctcagaagcattccagaaggttttcacactccccgtggtttgtcaggaggacaccgttttgtggcattgggtccacatttgctgccagcatagcctctggaatgcacggcctgcttggggttgccatggagaagctgggtctgttggtggtttgaactgagccgcatacaatagagcaccctcggcagccagccggacgggcaggccgggggcggggcagggcaacagccttgtaccctgctgccatctgctttgaccctgccaggcagctgcagccctatcccttagggttgttggcagattaaaaatgtagtggatttaaatcatgcccacctcattttgcaagggttttcttgagttctcctccaggcttcagctaccaacacgcccctatgagtctctgtctccgagcagaggtcttggtgtcctggtggctgcatcccaggggagaggaaggaacccgtttcataagcgcactcacgttggagcagaacagagtcactaggaggctcgctgtgatttatcaggggccatgccacactgtccttgcacacaacgtggcttaagtctaaacagaaaatagacctcacgctgagtcatccttctccataatggaagatgagattgtgctggcgggaacacatcatgtctggggacgtatgctgccatcgtgggaatgtgcctctttagcacgcctttaacccctatcctgcaagcatctccctctaaatgagggcgataggaagactccgatgctggggcagagccatctcttacacacaacggcgaaattattttcttcatctcagaaacaggttcccccaggaggacataaataaataagggattcctggtacatactttacccatttttcagattttcctccttcttactcatggcactcatgtaagtgctacttctggagtggtcccagccagataggtgcctggggatacaggaaagctcagggctgcgtttagaatcaaatagagctaatggtgaagtctcttcccactgaaaagagaagcaaaatacttttcagagctggatcgcttgctgctttatatagagggctctgcttttgggggacaagctctctctgaaacccaggcccacatattttataagtgttcagggaagactgtcttttaaaaaggtacaattaggcaggcatttgcttatcatttttccaatataataggtagagagattgaggtcacatctctgggaagagtctgatgagggcattgtttcctctgggccaggttgcaaacttgctacgtgtctgttcacccatctcgctctcaatctatctctctctctctcatatatatatatatgtgtgtgtgtgtgtgtgtgtgtgtgtgtgtgtgtgtatgtatatgtgtatgtatatatatatgtgtgtgtgtgtatatatatatatatatatatatattttttttttttttttttttttttttttttttctgagacagagtctcgctctgtcacccaggctggagtgcagtggcacaatcttggctcactgcaacctctgcctcccaggttcaagtgattctcctgcctcagcctcacaagtagctgggattataggcattgtgccaccatgcttagctaacttttgtatctttagtagagacggggtttcaccgtgtcggccagactggttttgaactcctggcctcaagtgatctgcccgccttggcctcccaaagtgctgggattacaggcatgagccaccgtgcccggccctgttcacccgtctctaaaatgaggctctgtaaggttccttctagccctgacatgctctcagtctagggaaggagatggggagctcttgtaggttcttctgcagagaagatgcatcttcctggtccccatccccgacctgtggtctttccgcaaccctgcccgttcatggcctctgggctggtccccctcactcctccatctcagtgggagagatgcacaggatgcctctggagctggtgccaggagtaaggcccccttcccatccagggaacacttggttctgcagggcttggaggcatccgaaagtcagtgagagatgaggctgggccgctctgaagttcaagggtttggaaacggtgtcctgggtacaaataataaccagcctgagtacctaagaggttggtaataagaggcacagtaataatgcctggcatttattaaatctttactacctgccaggcatgagtaagtgccttgcacatattttgcatcaaatcctgtagggcaggtattattatccccattttaagataaaaaaaaaccgagggttagggaagttcatttaccaagatcatttgcaaagtaactgatcttgcaagatgttgaagtcaggtcccactgacttcaggacagagtggaagagtttaacatccttgtgtttgcctcaagcaaaaaggaaaattcagatgatattcattgtactgcatgtgcgcacactcacatatacactgtgcacaaacacacacacacctgccctggctgttccctgccaatcacgttccctggtgcacagtgcctgctacagccatggacagctgtgtggaagtcatcaccacatagtcacaaaaagaactgatcacccctctccaaggactgatcacaagttcacaagcacagtggggtctgcagcagagaagacttccaggctgctcatccagagcacctgtctgcagccccatggtggcccaggggagggctttagcagaggccaaggctccctgtgttttgcttatgactgggagtgttcatcatgcgtggcccctgggctgtctttcttccaataatgggatggagcctgatagttccgagtggccagcattgagatgaggcttgagggtctagaactgcagtgtctgtgtcccccaagtcataggggtggccctcttcggccccagaaggctgggggtagagcagtgtgggcagtggaaagccaggcttggcccggagccccatgaagctgccatcgcccagcccagcttgcatgaaacaagggccatgggaaactccaagattcctgtcccaggcattctttcctatttaaggagtattttttacttaagcagctactttggagcagacaggggcaagagaaatagagaatggtaggtttctcaacctcagaggatgatgaagataaatgcatgtcccgcagaatcatctgaagcctgcggcaaggactctgggctgagctccaagatacgggttcaaggcccgtgttgcccccagccttgcctaagtctcttagcatgccctggtccctgtttcttcatttatcaagtagggaaagtaaaatagcccttacaagttggtgtagaaaatgtcaaggagctctccaaatgaggaaaccggggcttttctcatccgtaataacaagaagaaaaattatagaaggaaatgtctgtttagttatattttcaactatcattgactcctaaagtagtgaaatatctttgaatagatattttaaaaatatatacctaatataatgaaatataaatatttttctatattacattctatataaatatttactatatttaataatttatccttatatgacatgtaaatatttacatatataaatatttatgtactttagtccatgtgtgtacatatacacagacaaaacacatatgcatatgtattttggaaaagtcagaacaagaagaattataaatgaagatattggcactcaatagcatgcataatttttttcctccagcattttcggttccgtggatagggagtgtgtgcattactgtttgtaatttaaagacaaaggaaacatgatcccagcttctttgtgtgtgcccgcccgacgccacgtccctcctcccgtgcctctgtccgcatgctggtttacatagagtagctctgggtcagccatggctgcctgggttcctcactccagggtcctccttaggatgtaccccaaaggcccaagccccccatcccccttttcattctgcagggtgtgcatacacacgtgcaggagatacgccacactaaccagaagcttgctccctgtttaaatgtgaggctagggtaggagggaagaggacatgtatccgcatatgttagctagaatgcagcccaagctggaggttggtgacactgcagtaattggaggtaagagctgtgaggccattcagataaatttttgacataaaaatgtaggctggttcataaaaggttgcagtgacaataggttatagtgacagcttttcaacaattttctaagcctccggatggaaggggactcagcataatgaattatgggtggtctggacaacatggtatcctttcataggcatggatctaagggcagaataaagttatccaggatggcccacattgaataacactgttgttaaaacatggactggagaaggagagaaaagattagatgcttgaaagactcagcgactgtagctgcaaggccttggtcttgcaacctgggcactgggtgttcgcagctcccatcctccagcgtaatgagcacttcatctgccagattctaggttgaacatcacgcctgtctggcagggctcccgggctttcctgcaaagggggcgttgttcctctaccagctcagctgtttgtgcggttttgcccttttgattaaattgcctctatcaactcctggatgggacttgtgggacccttcttaagtggatgtcttctggaggggagactatgccagaaggaagggggctcagagaaggagtgggacccatcaggttgggagaggggaaaagccctggctcccacagagtcctctctgccagaatccacccttcgcctctgatcaggtactggctgctcagtcagagagcagaagcagccacctttgatcctgtctttacttaggtgagaataataacagccagtatgataacagaatgataaccatcacttgctgagtgcctacagtgtatgtgaaactacattaagcactttgtatcatctcatgtaaacctcacaacaaccctgtgatgtaggtattgccattcccgttttatagagaagaaaactgaggcctagagaagctaatctgcagctcacagatgttcaaatagtttggagttgaaattggggtctatcctgcccccaagtttgcgctcctggccactgattgtgttatactaactcctgaacactcacgctccaagaccgcacaaaaaggcgtcgtcaaaaggggagaagagtttatgagtgtctcccaggaccattgagggggcccggcaagtcggggtacaagatttgctcagccgagaaaattcattttaagtgggttttgggtgggagtaaagcgtccttggtagtgaaatgtctgtattcagtgacttcaagctgggcttgtgaatttatatgaataatttgttaatggcagttacaggagttgaagtaatttacgtggtcataagggagtaaaattctgccctggaatgtgcatgtgtattcaagcctccccctctgtggtttgccacaggaaagcatggcaggtctgaggtctttggaagccttgctcatgattgcaaacgagaccaggccagggtctgtgagagcttagccatgcacccaacctcattgtgatgtcctgacatcttctagattgcaaacatcaacgtgttcctttgcatgagaccactggggtgggagggttactcttagctctgagatacccagtgagaagcgtgagggcaccttccccactcagtagtgcatctgaggttggtaggttcccaggctagcccaccacactgactgacatgatcttgtctgatggagacccaggggtttccatcccacatccgagcatgttgttattcatgccccagcctttgcacagggccgtgctgtttgcacaccaagccctccgcagtgtgggggtggtagtggagggctcagttaatagctgctgctttgatatcaggctgtgaaggacactcttggggctctggagccaggggaggacaattgacgggggctgaggcagggcagagggagcagaatccagtggctatggcagtcactgccctggagaaactcacgaaggggcaggggacacagcaagggtcccccagtgcatccctggtccccctgtgccatgacgagcacagagtatccactgctcattttccccagaatttggagacagccagagtgtagggccttttcatcctaacacacagagacagcccgtgcccgtcggcaagacatgacgtcgttcctgtgcctcccagagcatctcctgagtcatccgtcccagcacccccctgccccagggcctgcccaaagcaggcgtattgtgttaccctttctccttgcgcttttcttggtaacagcactggctgcggctcctgcacagaggcctcctggagacattctgtcctggtcggccccaaaggctggctctgagtcaacacgtccatccctaccctggaagctcttcctcactctgcccagagtcctgtgtgaggccagtggggaacttttaggaagccacaacaggggtagggggtcaggaaagctgtgactgtggcttaaaagcaggtgaatgtccctcctacccaagggacagctccaggcagctgctctacgtgaatttttttttttttttttttttaaggaacaaggtcttgctgtgttgcccagactggtctcgaactcctgggctccaagcagtctacccatctcagcctccaaaagtgctgggattacaggcgtgaggcaccactcccgacctctacatgggaatattctgtcctcacggtctgaatcccgggtcaagggaagacctggaagtgtatgaggttggctctcaggtgctactcaggcccagcccaggggagccacaccccattggctcagtgagatcaggaagcaggagagggtctgctcagcctaggccagcttggacttgccagcaattctggggcttcatagacccctctgatttcttaggaaaagacatcacagctcttgccaatccatgagtcactgagtatggcgtgagccaccctctgtgcccagcctgatggtgggcagtctggggtgaggtcaggacaatgcctctcttcagggtaggtcaaagtcagggaagtgaccccccaccccagggcaaacaagggctcaggaaagcaggtttgaggtcagaagtgaagttggacagccttccctggaccctggaaccgtgagaaatgcccaccctgtaggagtttctgtagctgctggagccagaaaaggcagccagaggtagggcctcaatccagaaaccccgttcatcccacgtggctggatcccacctccaaccagcagtcaaggtgtttcctgggctggaagatgaaggctacagcggcggcagtcagggctctgacagcaggaacaggggcatgtcctctgagttcttgggggacctctgctgggccctgagctctgtgtctcgggacaaaaatcccagattccagagctgaaggcacttcccaggtttcctacccagccagttgctttccaggtggggtctgaggcccaggccttttgaaaggccctggcacgtttggaataaaaattctgaaagtgctgattttctaaaagagggagatcgaggaggctggccgggaaagcatacccttcctcgggtgctggagcccaggaaagccgtaaacactgtgagtccacatcccagcccttccctgtctccaggccagtccagcattgtgtccagccctggggagcaggccaggccgaggagccctggtggattccatcagaggccctggtgcagctgcattcacggtccagcgggaaaggaaggctgcactcagcccatccccgagttcagtgcaggaacagctcttacggggtccccactggccacccaacattgtccccgtctcctccagagggactgtgcccagaggaggtgcccagatttgtggcgaggttgaccatagcaccatgaagtcggttctgtgagctcaggcctgggtactgggtgcacagttctagtgtgggtctggtcttcagtgctcagggtctggggcagcccccgaggggaccgtgttgctatccagtgtgaagcatctagacaaaggaccattggacaactggaagatcctttcttttttgtttttttattttttttattttttttatttttttgagacagagtctcactctttcgcccaggctgcagtgcagtggtacaatctgggcctcccgagtagctgggactacaggcgcccgccaccacgcctggctgtatttttagttgagacggggtttcaccgtgttagccaggatggtctcgatctcctgaccttgtgatctgcctgcctcggcctcccagagtgctgggattacaggcgtgagccactgcgcccggcctggaagatcatttctattctctataactgaggcagttgctgctggttaccgggcttgctaataaatggccccactgggacgcaagtgtcacagggggagagacttgacagtgatgaaaatgactgatttcctgggagacagcattccctccagcagcagcaggagccctggaggtggccttggggggcttttccttctggttctgacactaccatgtcctgagagctcaggcccctggagcactgagtgcccatctgcaaaatggagagagagcaagtcacttggagtcattttagaccatcatagatctgagcaagaggcagggtgaagacagaaaggaggaccttctgaggttagaggggaccccttccctggaggtggtgtccttaccacgcctctccagtgcctcctcctccctgctccttgctgcctgtcggcctgaggtccccatcctgacccatgcttcctgccccccagctgtgggctgcagccaaggccagggaagcagttgtcccctcagccgtttgcagtacaagggccaggcccctctgatggggaaataggaagggctgttgggagggtccgctgagcgccccaactccacctggccctgcctgctagatcaggcctgatctgacctgccaccgccttccctggagtaaggcctcagccactgggagggcagcgtggccctgttctttttcctttgttgcttttttttttttttttttttttggagacagggttcaccctgtcacccagattgcagtgcagtggcaccgtctcagctcactacaacctccgcttcccaggctcaagggatcttcccatctcagcctcctgagtagctgggactacacagccagctaattttttaattttttgaagagacgaggtctcactatactgcccaggctggtcttcaactcctgggctcaagcagtcctcccacctcggcctcccaaagtgctgagatcacaggcatgagccaccacaccccgcctacctgccccttatggagcgacttccacgcggctcttgtatcacagctgaaggaggcttcatagggcccagaccaggccttccacagaacacagcccccggcgccccaggaactgcgcatggtgagggaccgtaagaagcccttgcccttcatcttctctcagtttttgttgagctacaaagtcgatttggtatattttcagaacatgtaactccttagtgattagactgcccatgaaaatagacacatatcctagcctctaggcccaaaagaaagaggaactataataaaagcaaagaagtcattcaagccctcctccttctcaggtgcttagcacacgtgaaatcctccaaatcctcaggaactgggaaaaccgttttttttttttttgagacagggtctcactctgtcgcccaggctggagtgcagtggtgtgatcttggctcactgcaacctctgcctcctgggttcaagtgattctcgtgtctcagcctcccaagtagctgggattttaggcacccaccaccacgcccggctaatttttgtatttttggtagagatggggttttgccatgttggccaggctggtctcgaattcctgacctcagtgatctgcccacctcagcctcccaaagtgctgggattacaggtgtgagccatggtgcccagccaagggaaaacctgtcttaaaggacaagtgagagtatgggagtttcaggtggggggatcattccgtgagctagtgtgtgtgtgtgtgtatgtgtgtgtgtgtgcgtgagagagagagagagggagagagagagggagagagagagagaggcagagagagagagaaaggagagagggaggaatgaaaagagatgattgattccagaacgttcccgggccttgcacacagcctgctcaggaaagctggaaggtcctcctcccagccgctctgctgctgggtgcaggggtctctggcctcctttgtttcacgtcccttgtgtgattgcaaggcgcccttcctgtgactcactgtgtccttgcctttcccaatttccaactcagtttagccaagggatctaaggcacggggttaggcactgcctcaaagcatcttaggaatctgcccaaaattccgtgttcatcctgaccgatttaacaattaaaggatcactttatgaaattccttgtcttataaacgcaattagcagttttaatctcctgagggaacaaatcattcactgcttgatgggagttggttttatcagagaattttgcttctaaagttaaactgaaataaaagcagaggggaagaggagagtcatttatggggcatctgagggcagctcagggagagcagaagggagcttgatgcttgcagaacccacactcaatggcaggcactgtcctagtcccttagacacccttagctagggcttatcttagcccattcaggctgccataacaaaatactgtaaacagggtggcttagaaacaacagaaatgtatttctcacagtcctggaagatgagaaacccacgatcaaggcaccggccaatgtggtgcctggtaagggttgggcctggctcatggacagcaccttctaactgtactccatggtggaaggggcaagctctggtctcatgagccccatatgagggcactaatcccattggtgagggccccaccctcatgacctaatcacttccctaaggcttccccttctcataccatcacactgggggttaggttttgacatggattttgagaagacacaaatatttaaaccacagcagggctctgccacccacagaccaggaggtggtgactcagagagggcctgcaaactgcccagaccacacagaccaggaggtggtgactcagagggggcctgcacactgcccagaccacacaggagctcagagatcagctggggatttgaaaggtggtcactctgaccccagagaagaatctcttcccactgccccaagctgggaatgccaaagggaagatgggattgagaagcagaggggatgcagaaaaggctgcccaggagaaccattagcaatccattttggttttttagtcttgaaccaaatggaaaagttacttttaatgaaatatctgaaatccagtcataccctatcttatacatatttgggactacattctttagagcaggggtcacccacccccacaaaccagtacagtccatggcctgttaggaaacaggtgcacagcaggtgagtggcaggcaagccagcatgaccacctgagctccatctcctgtcagatcagcaatgacaatagattctcataggaccgtgaaccctattgtgaactgtgcatgtgagggatctaggttgcatgctccttatgagaatctaatacccgatgatctgaggtggagcagtttcatcccagaaccatctccccacacccccagccccatccatggaaaaattgtcttccacaaaagtggtccctgctgccaaaaaggttggggaccactgccttagagagctctgaacttgtttcttttgtgagcaagcctctgtcatcatgtgaactgccgttcccccaatttatatgtttagtcactttagattctctcacactcatctctttctagggaccccggaattgtcccaagatgaggaaggagggagggcgggagggtgattctccagcctacaggtagtcagtagttgacccaaaatgtcaccttttgttgtccacacaaagacagtaatttccatctccattcccagcatgatgggagggaaaaaggaatgcacagaagtcatttggaggaagttcccacatacagaagagagtaaaactttgtctgtaaacatgaaaataacagcatctgctggtgaagttttggtcttttattttgtgttctcctaaacatatctatagcttactgtctgtaccaggaactcccacgcgcctgtgaggtctcttgcctgttgccctgacttgcaactgagtatttcatttttgtgttcatccttcttcccctacaagactgcagtctccttggaggtagggcccagtcttttttttttcctctgtcttatcttctatgcctggaatatcgtaggagctcagaaaatgtttgttgttttgtttttattcaaagttagagctataattcacaaaatacacacctcacatttactctgttaaattcttcctttaattgaaatgcattcatttggagaaagcgatgctgataggaagcagataactggagaaccgatgattttctaagtgctgtgggccccttaggatgtgaattacaatatggagcgtttagataccaaacccattgggggaggcactgaggattatccattctcgcacagagcactcaatacaaaccccaactcatattaattaaaaattctaaatcacacaattgtttttttctacgaatacttatatgctctgttttatcaccattaataataacgataaagataataataataataaaactactgtgtgattaaggtgcagataagcaattaggaaataaaatatttacaggtttttagggagccctgtgctcagaatgggaataggataattacaatggaggtttagtatgagagctcattcgagaagattctccactgagagttgaagtcagtcactgggttctattttgtctgtgattctatcaacctgttcccctgatatcagtcatttagtcactcattcatttgacacagatgtattaagtgtctcgaacatgccaggcagtgtgctagatgctggaacatgagggtaaatagaacattccccactcctgtggtctaggggtggttatggcattacagccaggagggagatggcctgcagtggcagggcactgtgtctaagtcgaggactataggatgagttggagagctccaggagaaagtgtgggagagagaattccctggagacgcctggtgaagagttgtaagcttggtgcttgtgaggactgaaaagtcattgagccctttcactggagaaggcagcaatcagagatgagctggagaggtgagctgggaccacatcctgagggctgtggggagccacagatgggtttttgtgaaatagagagcaggtgtgctcttcagaatgcgcccccctcggctggttgtggagcgagggaataggaatcaaggatgcctgtgtggagccgggtgcagaatttcatgataaccgtggcctagagatgggtaatagtgagaaaagggggaatggggggatttcagacatgcatgacagatgatgataataatgatgacaaatacataatacgctcttaccatgtgccagagcctactacaagcactttgcgtgtttatttggttcaaccttccaacaaaacccgtgaggtagtgacttatccccattgtatgggtgaggaaacccagacacaaagagattaaatagttggtgcaagactacactaatctaagtagcaaatgggaatcagactcctgtttggatgtgaacccacccctgaccccccacttctttccagagcccatggtccacactactgtcttcagtgacatgggggtacgggaggtccattactcaggtagggagggtaggcagagcagatgagttgcttttgtgacacatacccctgacagtccctcagggatcacatggtatcagaagcagtggagagtcctcatccctggctggccatctcccccaccccacaaagcccttcctcccaacacttggaaataaagcctttcaactggatgctagtagtcagggactgtcttggggtgggatggggcgatactgctgctgggtctgttgggcccatggccaggcctcagctccaaactcaactcttgctggcctctcggtactgaattgcaccttgctgtattcgttctggtgtgctttggagaaccaattgatttcccagctccctatcttgtcactatctgagtgagcttttatggagaatctgctgctctttgagaagtttcatggacattttcttcatcttttcctggaatgaagttcataaattggtgctttaagaggcttggtccggaatgagctgcagggaatggctagtttaaagacgtggtcatctctcctcagttccgcacttccccataggccctctgtctgcattttcactgtgggacttatgtggcttctgactctgaaattttcagtttcatcagtcatgatcagcagattgcctcttgccatcactccagacttgtcctttgcaaggcttggtcctgggacaagaaatagccctgtgtggtggggcgggtgccctgaaatgctatgcagaaagcctgggtcctaactgtgtctcaattcactacagaaactgggcccagatcaccttccattctggacctcactcgcccctgcaaaagtagaaatgcaagttcatgttgttggataaatatttgcagcagtaaagtaagataatagattcatgtatttattcaccatttattaatcacttattctgtgccaagcacagtttcaggtgctttggttagagtaataagcaagataaacaaaaattactgcccacatggagcttaccttcaagtggatggaaagacaatgaataagtaacaaaaatatctagtatgttagatggtaataagtgctggcgagttccatgttcaaaatgatcaatgaggaaatgctgaccaagccttctgttgaagatagttagaaaagcaggtagtgtctaataaccattgtcttgaaggcattggagaggtaacaagacacggtgagctgctattcgattcgggtctgggaagcacagaggcccgtggaggtaagccttatgcttacagccagttttcctctaggagtatttggcagttcttaagagacagatgagagctgagcagggcgcttgacagcaggcttgcagggtcagaggaccaggattggaacccagagtctgccaagggggccagtgggttccagtgacccctgtactttctttggcctgggactctgaagggctgcacactgggccctctgaggagctgcctctctgcttcaaatcctctgggttctccaaaatgaattaaggtgatcccgtattactagtatccctaggtgcccagcagaagcagacaaataatcttaggagaaagataccatcttgacctcaaattatttctaaaacaatgtgcaaaggtagaatctgtaacgtaatttcaaaaataatcagatacaaggagaccacaataacaaatatcagtagaaacaacagaaaatagaaagacccataggggttccagatatattggaattctcagacacagactttaaaataactctgcttaccatgttccagatgttaaaagaccaaaattggaattttcagcagagaaccagaaactatatatctttttaaaaacccaaatgtaaataaccacataataccccaaattaagaattcaatgtcgagtttaacagatgcaaccaaaaaaaaaaaaggattatgaactgaaagattgattagaaaaaaaaatccaccttaagtaaagagagaccagagaaaaaatgcaaaaaaaggcggggaggtggggcagtaggagttaaaatgaaaatgtctaacacacgtataattgggattccagaaaaagaggaggaagaaactgtgtcagaagcaatatttcaagaaaatgggtgagaacatttctaaactgttgaaagatatcaagtcatagattcaagaaacactttacaagcaggataaatgaaatctaaaccaaggcattcagagtaaaactgctgaaaattaaagacagagaaaaatctaaaaagcaggtggaagggaaagacagattactttgaaaagtacaatgacaaaatatataactgacttctcaataaaacattgcaagtcagaagtcaatggtgtgatatctttaaagtgctaaaagaaattgccagctcggaattctatacccagtgaaaatgcccttagaagaaagaacaaaaataagatttttttaaaaagttcagacaaacagtgaaataatttgtcaccagaaagcctggctgggtgtggtggttcatgcctgtaatcccagaactttaggccgtggcaggtggatcacctgaggtcaggagttggagaccagcctggccaacatggagaaaccatgtctctactaaaaatacaaaaattaggtggtcatggtggtgaacgcctgtaatcccagctactcagtaggctaaggcaggagaaattcttgaacccgggaggctgaggttgcagtgagccaagatcacaccattgcactccagcctgggcaacagagcgagtctcaatctcaaaaaagaaaagaaaaggaaagaaagcctgcactgaaggaaatccaaaagtacatttttcaggcagatgaaattaattcaaagcaaaggttagagtttcaggaagcaatgaaaagcaacaaaaaatgtaaaaataaggctatagataaataaatatcaattgtatacaaagataaaaaatctcttatgaaacaacatatatagagagaaataaatgcaaaaaaggcttagaaatggggtggagaacaaatgaaatgaaattattttaaggcccttgaattgttttaaggccaaggaagagagtataagtatcaatattacacttcaataagtcaaggatgagggatgtaatatctatggatattacaatgaaatacaaaatacctaatccaaaagaagacaaaggagaaaagaataaaaggaacacagaacaagtgagacacagagagcattagcaaaatgatcaatttaaacctgaatacatcagtaattacatcaaatgtatatgctctaaccaaaagacaaagcttttcagactgaaattttaaattctcactctatgctatttataaaaaacacattaaaagagaaaaggtatagaaagattaaagggaaaagggtagaggaaggcaaaaagatatactatgcataaaagcaggtgtagctacatcagtatcacacaaaattgactttaagacaagaaacaatacttcataattactattttttaaaaacccatccttggccgggcacggtggctcgtgcctgtgatcccagcactttgggaggctgaggtgggcggatcacaaggtcaggaattcaagaccagcctggccaacatggtgaaaccccatctctactaaaaatacaaacattagccgggggtggtggcacgcgcctgtaatcccagctactcgggaggctgaggcaggagaatcgtttgaacccgggaggtggaggttgcagtgagccgagatcgcgccattgcactccagcctgggcggcagggcaagactccatctcaaaaaaaaaaaaaaaaaaaaaaaaaaacccaccactctcagctcaccaggaagatacaacaattgtacgcatccaagaactgtgaaaggaaaataaatcttgggactccaaaatcactaagctgaagggaaaagtcaagttgggaactgcttagaatcaacctgcctcccattctatcccttaaaaaaagataagtactaagattttaaaaacaagctacatacctccctcacaaggaatttccttgtggacaaaggacagatagaactgaaagtcaccactctgctcactgagatagatgcgtatctgacggcctcctttggaaaggctaatcagaaactcaaaacaatgcacccatttgtcgcttacctacctatgacttggaaacccccttcctgctttgagttgtcccacccctttccaggcagaaccaatgtacatcttacatatattgattgatgtctcatgtctccctaaaatgtataaaaccaacctgtgccctgaccaccctggacacatgtcatcaggacctcctgaggccgtgtcactggcatgcgtccttaactttggcaaaataaatttcctaaaatgagacctgtctcagatacccaaagggttcacagaacatagaacatagcctcaaaatataaaaggcaaaaattgacagaactagaagggaaaaaatgaattcacagtcacagtaggaaatatttaacacattctctaaacaacaaaacaaacagacaaaaataataataataaaggtatagaagatttgcaaacacaattagtaaacatgacaacggcttagagaatattgtacataaaatctagggaatatgcgttcttcagaatcacacacataatattgataagtgcaatggagaaaaatgaataaggagtgttagctgtgagatttgaaatagtagggttcggaaagagctctctgtggttgcctttgagcagagacccaaggaggtaagaaaggaggtcactcgggtcgctgatcgctgagggaggaacattgcaggctccaggctgaggcagggtgggctggtgtgttcaggaaacagcagggaccgcaaagccatccggtggtgggaagatgtgggctgtaagcccccaagagaggggcgccctgggccctgggcattgatgatgggaatggagtgtgctgctccctgcagccccaggtcagctccgcctccagcaaaacaagactcctccaaagcccgttccagccatcaggtccttctctccctgtctgcttagccctctccctagaacctgcgcttcctttcacagctcggcgcttcttccacgtcctatccagttgccctttcaggaaagacactgaacctggtgcctggggagcacgcactgtgggtctgcgatgagccaggccttctcctgggcttcggcttatcctcacaagcccgggggcaggctttgttattagcattttgcagatgagaaaactgctgcctcgacttctgctcttgtgtaaatgcaacctcctcctagagcctcactctcacgtccattttcactgaaccgggtgctgccagggaccccacttccagaggaggttgctgcctccccagccaccctgggaccatccaacctgggatcctgagacaccctgagtcgtatctctggggccagagaacaagtcaggacactcggagcatctcatgtgtgtctctgctgcagggagctctgagtcagcctgtagaaaggggtgcggtggccagggaggacgtccccgggctctgtgtgagccgcactgcctctcacggtggacctgcgagccgggccggagcacctgcactggtgctctgggcggagggaagttgctgaagttgcactttccatgggctgcccaccccagctcctggggccctctgagaaatcccattattccagtctagggggcttcacatccccagacccctcatttgcagcctgatggttatgcacctgttagggtcactgcgtggacacagaccgtgctgaggatgtcagattagagtgaagtgaccatgaccttgttcagctgcgccagccttcctgcacgtcagcgtcgctgttcctttctcatcagcacagccagtgcctatgtctgtcccctgtcagatgaaagatggcagatattccctccccagaccccctctgcttctcttttgggaatcaggctcactgtggcctctgggcttccagttctggtggccttgatccctcctcctaagggacccaagggtcagtccccttggagctctcagcaaggaagacctcactggacctatgggtcctggcctggagggtggacctctctgctattggccactgagccaggtctgcttctgccatgctcccctagtagcagcctgaccatgaggttacaccccttaccctgtcctcccacactccaagtctgcctctccctcctcagcctggggttctgttctcttgagccctacaaaaagttcatactcagcctggggttcattcttctctttaatcctgtgacagaaaggctgcggaggttgtgggagccttgtaatgctcattttacctaaactaacctttcttaaattgggggagccagggaaagatgaaaggagaaacacgcacacacacggcaatgtaagttaaagaaaaaaacatttaccaagtctctaaatgttgtcctcgccccgcatcctattctgctgaataaagaaaacagaggtgacttcgggctttttaaaatcaagattttattaaaaagaaaccgtttcaatcaagcaaacaattcacaaagacattttctagaatagtgagaataataaaaaccatcatttttggagaggccgattccttgccagaacctggggtcatgggcttggcacccatcattcttgcgcaccccatgaactgtaagagagatcttatccctttctggaaatgagcgaacgggttcagagaagtctagtgacctgtccaaggacacagagcccctgaaaggtagctctgttgtctgcaccaagtctgtgtgactctggcaccgttcccggggtcattcacagcagggccccgctcagacctcggcgggcagcgagaagaacacatggagattctgacttccagcacaaaggggcatcctgccttgtgtttttgtttcccatttctgagcattctctctgaattacagccgtgaccgccgtatcgcagcgtgtttgcccagcccggtttgagttgtaagctggtgaaatagaagaatccttgtgaaaatatgaacacacttttatttaccaaaggtaaatgaaacctttcactgttctgaagggtttccatttttctgtcttttgtctcctccctttgattacccataacattaaccttcaaacaacctggcaaatccgagtctgatttcccggcagcctcctccttcagccaggcagggcacctgttgcaggccctcttgggatcaccaggcagagaagcttccctgtgcttcacacccactcacgcctgtccccccgtcctgggggaaggcagttccaggctggcccatggtcactgtgaagcgctcctacttaacaatgcaagtagccatccctctgtccagctggctttgacgaggctctgccgccgcagcttcttgcccgtggctctgtgatggggaaaaaaggaaggaaaaatgcgttccatgcagggcctgtcactgccgtagaaacagcagtattattttcagggatgttgcgttaataggggaaggctgtttcttggaaaatactgccttcaagtactgtgactcttttcaggttatataaaagggcattaggcaaacactcagaaattcagcagcttccttggttgggagtgtggagggtgggtggaccagctcctgtgcacctccagcggcagccacgcagaatacgaattggctgcagttaccgtcctcatcagcccgcagtctggatagtatcagcaacaggaaaggttacagcttttcctgtgatgtattgcttcttcagagagtattaaagatgttttgaatctatttttttaggaatcttgaaaccaccagtggaacatttttgctgttgtgggtaatgcacaacgtagcagcgtaggaaggccgggccgcgagagggaaccgagggtgttggaagcaccgaagacggcgtccgttgtcattttaacagtgaggaagcaagtgaggcagagcatatgctgaggtgtggagcagctgcgactgggaagcgtgttatttcttttatttgctggggggcggagaagaggcagacaccgcatctcctgggagtgggcaggatttatttattgggaagggagtgccagaggaaaagttccgtcatcatggaaggaattctccagccctgcttagtattattgtttgggcctttatttattttttttttcctgccttgacactccctgcccaaagcacagattcaaataaaaattgtagccagagccaatgtctttgtagtagatggtgggacagtgaattttacatgtcaacttgaccaggccacaaggtgcccaggtatttgggccaaagatgatcctgggtgtgtccgtgagggtgtttctggatgagattaagattcaaatcagtagactgagtaaagcagctcgccctccccaatgtgggaaggcctcatccgatcagtcagtcggcctgaacagaacaaaagctgaccctgctgtaagtaagaggggtttctcctgaccgcctttgagttgggacattggtcttttgctgcctttggactggaactgaaacatccgctcttcttgggtctcaagcctgcaggcttttggactggaactataccagttcccgctcctgggtctccagcttgctaactgcagatcgcgggacttctcggcctccatggttacaggagctgattccttataataaatcgtatattatatatataatttctatgctattagttccgtttctctggagaaccctggctgatatagaaggcatccattaaggcaggggttgaaatcttaacatctttcctgaacccatagcttgatcaagctacctgtgtcctctaggagaagaaagggtgactgaatcccaaagtatttggaaggaagccagagaaaagctctgcagccaccactcctctctgctgagaacatcagaggccgtgaactgtgtgaatagaaatgaggatgccttgccagacagccccctttacaggcagatgctggtccttcccctccaggggaacagggcttggagcacagatacaggcctggcagccacaggcccctcggcccagggaaaggcagcctctctgttgcaggtgggaggctccagctacagcctccagccattgctccctagacgtggtgtccactccttgctcaccccctgctagaaggtaaaggaaagcatacatgaaatgcttttaagcagcaggtctgtgactcttcctgcagcaggtgaggctctgagctaaatatgtcacacctggggtcttctgcggggctggatcgagagcgggcttctcctgcagtgtgaagggtctggttccagcctgggccgctggggaaattttgagggtggtgggtgttctcagaggggtctggggcctcacagtgattggagagtggggagaaatgggtgagggaaatgagtccactcatggaggccttagctgtgactccttttgaaatctgagcatcccagggatgagggcactgacactgatgtgaggaaattaggccccagggcagccgaagcaggctgtgcccatgataacagcagagactgcagcctaaaactctgaactgactgctggggtgcagaacacaggggagaagcctcctcccctttggtgaaaaatcaatgtctggtgtcaggactcccctattaacagcttgattagaaaggactcagaagttcctttgccctggaattgcaccaggaaaagagaaatggaagcacgtctggggcgctggtaaagctagcaagggcattaagtccagactgcttcatcccagcctgttagtgcctagttcacactcccaacttttcctgaacacctactatgtaccaggccttatcctggaaataaggcatggtctgtcctccaaggaattcatagtataaagtatggggttgagcaaataggacttagagtccagtagctcatacaggctccagggtttcctgtggggcatgctggggaaccaggggaaatgcatctgacccagatgaagggaggccagagaagggagctgtcaggggaggcttctccgaggggaggccactgagctgagtccctgaggataagatggagcgagcctcggtgagggggcccagtggacacacagaggccaggcttaggctgatgtgtggagattggacgcagcaaaccacatgagggtgctggcagagcatgaagtgccagcccaggggtggtgagagggggcaccaggaggccagcggggcccatcagggagttggcactcgatcccttcgacaatgggattggaaggtgttagggaggagagtgacatggtcatatttacattttagaaaaagaactgccttgccacacaaagaacagattcagatagacaccccaggtgacactccttggaggtcaggagaaggcagaggtgagggtcagggaggccagggctgctagaggaaatatttaggagggcatcggcaaggctgctggggcatggcgtggggggacagttaaagccaagtcccaaattcctgctttaggaacagggtggtgaggccagctctgggacagagcatacagcagagggagctgacccaggatggggagggagagagcagaggccagtccgggacacacagagtgtgaagtgcaggcaggacatccaagtggaagcgtcgagtgggcttgtgagcatctggaaaggtgacagtgatgtggcaactgggcaacaagaccagatgcaggaacagggtccccatccagaggtgggagagggaggcaggagaagaacgttccagaacccggataaacatcattgaaagagagaaggccaagcccgcagagccgggtgtataaacaggccagtgtgtgctgccgcgatgggaactccagcatcctgctggctggagcgctgctgccactctgaccagtgcattctacccacggggatgaccccgcatgggaagccggactcccgtcatgaaaccagtgttcagggagccaggcggaaggtctttctcattgctcaggctggcagcttgaggcacacacttccaccgcaggaacatccttggccgggggactgcagtgctccaagccccggtcccctggcagagaagcatttgcctgtgaagagggctggtcttggaaagcgtccagtctatggggcccagttctcacccagcagcagcagcagcagcagctgaggaactctacagcagagccccaggtcccacccacagccttccagagccagacctcccaggggagagactggggaagcccagccggactaagacctgctgctgacttccatctgctgattctcacatgaggcctagcagggagaagcctcttgtccaggttagctcaggcctcctgagtccctgccctcctgagcacgtttggcaatggccttggcaggggctgaaacagcagtaactgcagttaggagcacctaggaagaaaaaaggaagagaggagggtgaggagaggtaagggaggagaagacaaggaggaagaggaagagctcaggaggaggaggaggagatgagggggaggggagggggaggaggagtacgctcaagccctggtgctaatgggacagaccccccagacaggaaatgcagactggagagaatggaggtgaatggagatgccgagcccccaggagaataagtaagggcatcagtatatttcaagatgaagagaaggcgctgccaaaatgaagtgcagcagaaagctgcccctctccactttgggagtgcccagacaagctgctgtgtgcactggcatcaagtgggcaccaaggggggtccagcataccctcctccctgtggtggtcaaatgcagctcaccatatccaggcgtccaaataggggcagctaccacatatccctgggagcgtgaaggtggagacactggccaccagtatgacagcttgtgtgtaaatgtatgtaagaacaggacacgtgagagagaaagtctggtccaaaaggcaggtgcacagtggcccccacattcatccccttgggatgtgctggaagccagctgggcacctgcaatgcacatccttccagcaccctctcatcaggcctgggacacagggaactgtgattctcattttgtagatgaggaaactgaggctcagagacattaaatccttgcctggggcactcaagtaatgaaggaacagggactcaaacccctcactcttgatgccctgttgttctgacccccaaaggcatcacattccctgtgcccagcacaacacatcatcccctctgttcatgcccacacccctcatcctgaagtcaggactcagccccctcctccaggcagctttcctggactcacaaggccaggataggccaccaccatcccgctcacatcacagcatgtgatctctctgagttgcacctgttttcttacctgactccaccgatctgatctgctggagagccgagcctttgtcctacctaatcacaaaggatggacaaatgcgaatgatgggtcccaagagggacgaagcatggaaaactcccactcgggaccctggaccctagccatctcttctggactctcccaacaacaggagtgactcctcccagccctgaagtcagtgcagggcttcccctgcctggaatgctcagtctttccttcacagcccagcctaaggcctgctcctcatccctgcacttgggggcctttaggacgcccgctgagcattcaaccggacgccagccatctgcatgggtaataacacagggagcttccacatatagcacccacgtgttccaggcatggttctaagtcctttgcacatattagttcataattctatggtgtaggtacttgaattatctctgtttaagaggtgagaaaaggagggcatggagtggtctgtgagcttgcttggctttccttacttgaaagtggcagaacttggatttgaaccaggcagctgggctccagagtcctactcctacccactcccctgagtgagaaaccttgtcctgccctcaggagctcacagtcctgggtgagacaggcttctgcacggtgacatgaggaggtgacaagagctggtcacaggtggacccagcgtgcaggggaggaagctgtcccaccctgatctcgggtcttagacgggacatgtctcatgtgaggtggcctgggatgtgctggaatgtctttccttccccaccctggggacctggcaggtcccaggttccaacggacccgactcatggtgcccagcatccctcatggaccctacagtgctggcctgtcccctgcaatggcgatgagccctgggagccatgcacccaggtttacacgttagtggcaggaggacagtccgctgtctggggaacaatatgtttgcctgccccttgtagggggagcgagctctgttttctccctcctgtaattgttaccatctgtttccctccatcatgtttgttgatgttttcttgttttaaaactgaaatgagtcagattggaggctgatttaggaaaatgtatctgggaggaaagctcaaagtggccatgggggactctgtgttctggagtcatcggaaaagaaaagattctgtggggccagccgaggggtgtctgccagctactcctgccctgtgggggccggagtccccccgcagtccaagaaggctggggctgtgtgggtttctgtggaatgcatgtgtgtgggctcagttatgtaagtaggtgagtggacatgtgcacacttgtgcacctgtgtgatagtgtgtgcatatgtgaatgtgaatgtcatcccgggagtagggttgtacagcgtggactgtgtgagtggttggcatcttgtattcagaaggaggcagatgcagaaggagagagctgccagctagctgtgaccaagttctgggtttggagggtcccccatttctgcagctgacttaaatgtgacctcaagtgaatccatgaactaactccccgtgaataaacaatagaagagaattttgatgccagtgctaattccagatgaagatgaatgagtgggttggctgggcttacttggaggtatttatagatgtgtctccagggagaatggcccctggaggtgatccccaggcttctcacaaggcgccattggtattccacatgagctgtgcatggctggaagtctagcaattactacgtggaatattcatctctggggcagttgtgacccaaaatatttgacctgtactcccctgcctaccccacccagccccacatataagcttagggttcctctgtgggacaggaggcttcagggtcctggaaggaccaggtaccagataggaactagcttcctgagccattaaaacagggcttcagctgccttcttatcagggattttacatctctgccaccccccttcccaatcccatgctgatatccaccaattacctggactcttgcttcttcgttgccattatttagccaaagaaagatgccctgcgacattgcccctcactatctgtatctatgagcctggttcagctctgttacttgacctgcaattcagaccacccgccaccagaggtcgtgatgctttggtctcacagccaatagctacacttcccatagatgtggtttcgaattaggatccagcctgctttccagtcctttgcttttgtttcttgataatccacagcctgtgggggagtctctggctgcagcaacccagagaaaactgatggagaaagactgtgcctttggcacagcatccttcttataaaaggctacttaatattcctgcattctcgggtcccctaaaagtactaatagctgccatttgctgagcccctgccttgtcccaggtacgttgctaggtcctggaagtagaagattcccactgcttgttgaaatcagcctttcaaaggagggattgtcctgcctgctttatagatgaaggagagaagcaggggctcagagaggtggtatgacttgtgcaaggtcacaaggccagttaggagtgggccagttctcaaatccagacctgctgacttctggccacggctctgatcattatgaagaagggaggcaagtccaggagagccagggtgctgccagctgggaaatgtgagccgtggtcatccaggctggttggattttcaccagaagttctcagatcctgctcctgcccttgagcctttgatccagagtttctccttcctgggaagccacatggtctgtgctcagcctcacagcaggacacggggtataactcactccacttactgtgatgtttaggagcaagcaaaggaaacttctcgtgtctgcatatttaaatgcttttattaagtggaacaagctatttctgaacacgagagtgggcaacagccttagaagaaattaaaatgaaccatgacaatggaaaattgcacaggggcacggtggattctccggagataaatacaacaagcctttcaacagcattcgggaaagactagcgatcatggagattatgttgtgagaggaagaaagcaaaccgtcagaaaattagagctcaggctggtgggaggacccactggcgtgctagtcaggtctgtgggtgcctgtctccattcaacactccctggggtctagcgggcaagatggagccagagaaacaacaggcggatcgatctccactcggttcactcagtgtttctgaacgcccactttgtgcaggctgcgtggatcttatggactgaattgtgcccccagcaaattcacaggttgaagccctaattaccattgtgatggtgtttggagatggggcctttgggagataattaggttttgatgagattgtgagggtggggcccacctgatgggattagtgctcttgtaagatgaacaagagacaccagagctcactgcctggtgaggacacggcaagaaggcagcagtctgcaagccaggaagagagccctccccagaacctgcccgtgctggcacactgatctcagaggtcccagcctccttgactgtgaggaatgcatttctgttgtttaagccagtggtccccaacgtttttggcatcagggaccggttttgtggaagagaatttttccatgcatgggggtaggaggagttgggggggcagtttctggatgaaactattccacctccgatcatcagacattagattctcataaggagtacacaacctggatccctctcatgcacagttcacaacagggttcgtgctcctatgggaatctcatgccgccactgatctgacaggaggcggagctcaggcagtaatgccagcaatggggagcagttgcaaatacagatgaagcttcactcactcacccatcactcgcctcctgctgtgtggcctagttcctaacaggccacaggctgggtctgtggcccagaggttggggacccctggtttaagccatccagtgatattttattttggcagcctgagctgactaatgcagtgaggagcagagctgggcacttagatcttggcctcagagaactcccaagccttgaggggctgtcaactggaccatctgaagtttccatagatatcagctgttgtaattatgatcctgactctcccactagcctgtgcactcccctaggccagaaactattgatatctgtgtctccagaacaggattgcctctcagtaagtgtggggtgggaggggggccgcgttccttgtagcggcccatcctactcagaggccccgccgccctgcctgcgtggatgacgcccctgcaggcgatgggccccagcgctgagggagtggagctgtggtagccggaccacacagcacgtgcagacagaagccctcccttggacgtgaagggaggaaaccttggcctaggcagtctgggttcctgctgaggaggggacatcagtggagggcatttgtctgggatcccatctccaagggcgggccaggcccaacctcctcaggagttggcaccgtggctacccagcctcttgcagagaagaccagagcctcatgctgccctggttacccacagcccctgtgtgcagtgcccatccccgccccgctcctccccagcaccgctcctggggaagggaagtatctatctgccccaagagggctgtttctgtgtcccctgcctcttccaccactgcttaagatctctccgctgtgcctcctgccgtgggcctccagtgaatttagacggcatctggctgcccccaagtgtttcctgaaggctgaagagctgagctgctgctaaataccagctccttttaaacatcactttaaccacctcaattctgaaccaaggtggggccaaagaacaccacgccctcaggatcctgcctggccacacgtggctctcattacagacagcctaagcaggcacaaagcagccagcgcccaggagctggaagaaggcacgctgaggccctcgctgagccttctggaacattcccaccacggagcggtcatttctgcccagctctgacccccataccattcagaatctaggctaccgtcctgagacccacactcaggcgctgacttgtttgggtgagtcttgaagtccccacaataaaactgtagtagctccttcggtgcaccttgcgtctgaggagccgcctccgaggccgtgtgtgctgccctgtttgtctctttgtctcgctgcccctcggtgtgactctgccgcgtcccctctcttgttaggtgtctaataaggtcgctgaggatgtcgtgtcaggattgttgtgtggcgtcaagagtcgagctctcagtcgactccatgctctgggagtcagtgtcgtgagtcacacagcagaggttttacaatgtagagctgttcccttttcccagtgagtctttgtttgcaattttaaaaaaaaccaggaatgctctgcccctgactagaaaggaggaggccaggagtcttttttttttttttgagatggagtctcgctcttgtcacccaggctggagggcagtggcacgatctcggctcaccgcaacctccgcttcccggggagctgggcagcagttctgctgcctcagcctcccgagtagctgggattacaggtgcctgccactgcacccagctaatttttgtatttttagtagagatggggtttgccatcttgaccaggctggtctcgaactcctgacctcgtgatccacccgcattggcctcccaaagggctgggattacagacatgagccaccgcacccagcccgagcccaggaatcttaatgagcatgttaagcgactattgaggaaggtcacaaagggagtcgcagataatggagactcagtcttggggttttttctggctctgggggttcctgcacacaggacggcttagttaatcctagaatgccctctggggaggcgctgggaaggccatagggggcagaggggccagggcagcccctggccaagccgttgtaaagagcccacttcttcccctggggtcgttgggagtcatctccatgcaggcctgagtcgctgggctcacaattaatgttgaggccaggcatggtggctcacacctgtaatcccagtgttttgggaggccaaggtaggaggatcgcttgagcccaggagtttgaggctgcactgagctgtgatggcaccattgtactccagcctggatgacagatcgacaccctgtatcaaaaatagtaataataatgttgggtgttcagactgtagtctctgagggccaggccccatccacaaatggttcagtaagggagtccacctgtggccccacaccggcccatagccctgtacaggggacttttcctcaccagcttcactacggatttcaaatctgaaaataacaaaggctcccagaaatgggcgttgtgtgatgtgcgtctgcgagtctacagctgaccctggggagggcgggggtgggcctggagtcactgcccgcagggccggcagttggaaaatgtcctatcaaaggccagagcaggggctgcccctgccgtgcccacctccccgcccactctggcgacacgattggagagggtcaccgtgctcaggagggcgctgccttgtcaccaatgccgcggtgaccagaaacaggcagggcggcggggcctctgagcaggacgggccgctacaaggaacgcggctgttgggggagcggtgcggactgattgaagggggatgaaaggcccggccccgctctgtgagaggtgcccctcgcgctcctccacgtccctgtctgtccgtctgggccactggctcccgcacatcacaggcatctgctgagggccaggcctgccctgcacctttcagcagaatgaaagggaaactgatatcagaggggagctgaagcgcaggaaagggctctttcttttcaaagactttcgtttgtgatgggcttttttttttttctaggtgatcttatttcaaagcccctttgaaaattttgtgggttttgtaatggatgaaaagttacttggaaatgggactaagaagttttcggttgaaagttgttagaggaaagttgaaagctttgagttgtaaggttctgccagatttatcatttcctttgtccacaaggcccatccactgggaggggggcttggaggaaggggctgggggcccggacagggcacattccagagcacggtgcaaaaaccagccccatctgtggttgctttatgtgtgcaagggaggccatctgtgctgcactttcagcaaaagtgtctccaaggtatagactttgatgttggaaaagggaaaagcaaacatacttccaggatactatagaaagctgggttctatcaaaggcatgggctaccacacaggtgtttcacatcagaaaaatcattaagaaagaagacagggccccaacaatcctgagagagggagagagaggcctggcacgagcctggagcacttccatgcttgagatccgaggagaggagacaccagcgaacagcaccgggaggaggcgctgggaagaggtttaggtcaagaaccaggagaagcattgttaccgaaacggaggggcagggagtttccagaaggaagaaggaggaagccattgttagggatcagagaaagaggacgtgaaatgctcccgtatttggcattaggaggcgattgttcatttaaagggggtggtttcactgaagtgctgaggtgggcagcaccaggagtgggagccagggagataacagctagccccagtgtgctggcagggttggagcaggaggccctgtcgggctggacacagtatgagaaggagaggccgtggccggtgtgcttgcaggcacctagggagggctttagtattatcctgataggatggcatgagcgcagccttgatatggctgagtccatttatgggtctactggccacagccggggaggctggggagaggtagcctgggaacattcctgccatcccagagcacatctgaaggtcttgtgataaaatagtagacccgggttagagtcccaggcttgccatgccctgagttttttttgttttgttctgtttttgaaatggagtctagctttgtcacccaggctggagggcagtggtgctatcttggctcaatgcaacctccacctcccagattcaagtgattctcctgcctcagtctccccaagtagctaggactacaggcacacaccaccacacccagctgattttttttgtatttttagtaaagatggggtttcaccatgttggccaggctggtcttgaactcccaacctccagtgatccacctgcctcagcctcccaaagtactgagatttcaggcatgagccaccatgcctggctgccctgagtacttttgaacttctctggcccttattattctcatctgtgaaatgaaggtaagaacacagaattcctcatgaaaggaaatcagcgcatgccggcacctggagtggaggaggctgttaggacagtggctggccagggaggaccagttcatctgtgcctggcatctgtttatggcttgcgtcctcacagtgatccagtgagaaagggcacaggaagtgattggtggtttccacttaaagtatttacagatgacccttggggctggccaccaagccgaggatcacagggcaaggacagggccaggcctggggcccagacgggttctgcagttgtagctcccagcccagcacatggctgccctcaccaagcctgtcctctgtctctcgctcgctattcagcccctcctaccacctgccccatcacgtcctctgcccccacccaggctctcagcaggctcgtttaccctccaaagacatcatcatattctgtaatatgattggaatctgaatatatattttaaaggacaagattgaaattaaaatttaaataaagaattacttttctgtaagttgccccgaaagcagtaatttagcagcaagttgatagagaaaggtaagcactggtcctttaaaccatcatgcagtttccggcatgcgagccagaagtgtctcaatttaacacatcattggttagtattattagaaatttcatcaggcaccggagcgcattatggcagggctctgaaggggaggctgagggtgcaggcctggggccagggggccagagagggcagcctcgttaatgagggcaggtggggcttgggagaccctcccctggccccgcgtagggatttaactgcgattatcttctcatttgtagttcagtagcaatcaggaaatgagaactgagagacccttgaatgtcatttgcgcttcccggaggccacagatttccagctttggtggctctcaacgtgtccttctgaccccctgaaacctaggctcagaacagaagtcctcagaagtggcctcgtcaaggagctggtttccatgagccacataagcaagacccaaaactctcccaatcaggtcctgatgagcagcatcaacccctcagtccccacgcacaggcccaagaatttgaacgcaaagactttcattgatccccagagtgaggtccatggagtacctgccgagcatcccctgtaggtttattaaaggggcacatttttgggtccctcgcccaacaccaactgaagcagaacctccagggtggggtccagaaacttccattcctctaacaagtcttccagatgctgcttttgtgcactcccattggagatccccgtggtggtggtcagaagccctccctgtgtgatcttggaatctgctctcagtgataacctgccaacactagaaagcctaacagcctagctataaacctatgagctgtcatctaaaagatcccagacaccaaaatatctccttcccaagcctgagtttctaccattagaaagtaattcctttcaagtaagaactgccttcctggggcttcacctttgcagtgcaagagcccctgaggggcccacatgctcagtccccaacaccctggtctgaatatgtttgccaaaagctggatgccatcattccccacaggtggacctggcaccgtgaagacctcaagtgccctgcaaagggagggaagctgaaaggaagtgaaatatccactctttgcaggcaatggcctgcccagtgatgcccccctcctggagctcgtagctggtgtgatatgattccccccagggcaagccagggcccggtggtcagaggtgcccgcaacaaatgcacttctgctaggagcactgtgcgaatttgctcttgctgttctcagaagagccctaggaataaccctgcagagtgagaagaaaaaggaaatgacagcattcaccaccagtgctgggctgaggacaccagagcctccctgtcccacgtgctcccaaatccccattcctctgccaccagcctctgcagcgcatggactcggagcagtgctggcctcctcacatcacccagctttccagactgcagtctcacctaagtgggtttgagccacaggtcacatgccatgccctagctgcaggggaagctggtagagaaagttttctgatgtagggagttccaaaagtctggcatggccaatcagaaccatgccagagttgtagggagggccagcgcccgtgagcatcccttgccagaaggagccatcagaacccagggccaggcaggtgggatgggcacaccaaagcttgtcttccccaaatgggctgggtgttgtggggagcccagagatggaaacaaggcttcagatgaaggtccgggtacagggagctttgtctggcgttgtccctggcattgtcttccctggggctcctcaagttttcatccaaggccacttcacacccaccacccagctgggctgtgttagggaactgctgcactgactttagttctggcatttatgtaattagaatcccactatatttatgctgcccctaatcctctacagaacacaaagagatgcatgtaacactgtacatttatatgtcaagagtaaggcacaaatgactttgccctttactattttgcaatatatacaaaatggtaagatacacagtagtctgtgtatcccttttttttttacttttttcttttttagtggctgttaaatgacacattttataatatctcccaaatttgtgcacaggaattctgagagagcttggctagacagttctgctgatcccatggtattgactagtaacccttggtgatgttcagctgatttgctgatggtctggagggtctaagataccaaggcagaagcctcaaggcctcttaaaaagataggcccaggactggcatagtgtcgcatctgacatctctgtcaaaagagtcacagcactcgtgtgtgtgtgtgtgtgtgtgtgtgtgtgtgtgtgtttaatttgactaagtggaagctccgtgctatgctgaaggctcaactgtggcagttccaggagccccgtggcctgcatgtcctcagcgttcatttctctccccgtgttccctggtctggtctcccctttgcatttcctcatgattttaccccaccttttcttaatggtggcaccagtctctctattaacagggatgggagcgagacaacatcatgggtctgttccttgggtctctctccaagcctgtgtgacccccacggctccctggtgtaggtgtcccattctgctggttgtaagttcctccagggcaggaccttgcccagcacagatgcctggtacacggtggtgcccctgacccagagtgcgtgctcagtgatgcttggcagaaggcagccccgccagccctgtctgcaccacatggtacagagcatcgtggcctgcaggttcccatctgggagacagtttccttggcaggagagggctgtgggtgctggcatcatcgtccctccaggaaaggcccatgtgcaccccggaagtggactctgaagcctgtctctgtcagatgtatctaggctgaaaatgcactggttgctgtggggtcctttggcagtgacttgggcccccatccatctgccagatcgaatcctgcctagcttttgtggcccaggcccagcccatctcttctggaagcttcttctcgaggcttcattgattcaccctcttctgacatccttgggcaaacagtggagggtgctgtgttctagtttctccaggagactcccccaggttcccccagctccacagaggcagtagtcactcctcagtgtccatgccttcatcacacccaagcatccggaggggctaatgagttctgctggtcagtggattgggccatccagggctccaggcagcctccagcagcatccagggcaacagtgttaagggtcccagcacacccggcccccatgacgtggaaacctcagcacccccaatgagggaaccgtgctgtttcactgctctgctctgtgactcgtgtcattcactctccctggaatccaccctgtgcattcattcattcattcattcatcgagccagcagtgatatatgcttcttccactggccaacactttagctcagagaccctgccctcatggagtcatggagctttgcaaagacagggcagaaacaaggccctgggggcagtgcattaagtactgtgatcattgggtacacagagagtagaggtgagaacaagcaaggcctgggaggaccccaggggagtccctgccatctctcaaacctccctggccacacaggacgctgctagtctatatggcacctttgtgcaaagtagaaaaaggggtttcctctgggtggacaaattagcaaaagcctctcggggctgtgtgtcgcagactcgtgggtacacagcctggtgagcaaagggtactccatgggcatccactgctcctgcctccccaggtgagtgtcagccccttgccctctgccaggaatctttcattgcataccacctgcggccctacacacctttccctaaatgaagctggtccctcagagcagctgtgtgggccatgcacagctggttccccccaagctggtggagtgaacccacgtgtcctctgagactgctgcagggtggaggcccccagcccccatggccagcaggtgcctccccctctgcgctgcctcacggagagcttcaaccgtagaggccctcggtctttagtgttcttcagtcgctgaaagaagcaggatgctgtcagctgccataaaactgtgacctttgaaaatttacaagagctcagggtttaaaaagctgctgcgttaatgatgcatcccattagcatctcattaagggaaagccaagagaagcctgctcaggcctgatgatgggcagatagggccactccgtggggccaggcacagagaggctctcctggtctgcctctctctgccaagtgccatcatgtcactggagcagaaaacatggccaggaacactggggaacggccaaaggtctgggtggcttcactggtgtcccagatgatggcagtgggagggcacgaggggaagcttgctcaattctgccttcttccctgctgcccgggctaagttcttctggttggttttcgtggcattcttgtgttggcagccctcccgaccaggaggcatggaaatcagggtggcctgggcttgcagacattctgaaccatgggaggaaagagttagcaggagctgggctcagagctggacccacggccctgaacatggtcccctagaagcttccagaacccggggaccacatgggtttactgagggcctggaactcgtcgtaggaggggcctctagtcaggccgcgctgacgcacatcaccagtggctctgcacgtcacccacccgggggcccagcctcctcggcaaagggcacaccccgtgtccaggttttttctggaggaagtggaggaaggaatgtcattgcattattttaataaaatacataaaattcctgaactacaggttgcttgtagcttcagatgttgtgagtgctcagtagaaaatgggtagccttatgtatctaccctaaaggaaaaaaaaaaaaaaagacttgattctcaccacagagctgctttcttatacataagaaattgcttgtagtattcatgaacgacacagccaaacagcaggccggttgtagcccacttcgcctgctcacagcccatctgggcccgcctctgcacacccgggataccccagcttctttccctcgagctgttcatatattgagtcctcccactgtcccacagcagccacttgagggcagggctgagtcttggtcacccgtgtccctagtgcctcgagcagtgcccgacacagacatacagcagaagaaacaaactaaatgagtgagcggtaggagtgctttgaagccaaggggctgagcaatctgtgttggaaaagtgtgagatttttcaagttcagaaactccaccaattttagggtgaccgttggaactcctgaagttttagcgctcagaacatggggacccaaactcgaggagaccccaacctcctctcctggaggcaggggctgctccagggcaagtttccagaagcttccctaccctgtcgagttgccaggccggagtgtgattcaggaggggagaagcagtggctgtcggaagaggctgaaaacctctgcagcctcttgcctgggacacctctaggatcccacacggtggagaggggctgcaacaccccctccaggcaggaggggcttctgtactgtccaggaagggagtgccggtcaggaggctgggatcttagcattcacactttgctcccaggcccagtgtgggacttggcacaggctccttctccctcagatgcctctgattccgaggaaagcaatttcctgcctctgagcctccaggactggagagcctggaaatacagcgaaggctgtggagtggatagatccttcagacagggcactcgttaaaagctgtctatttggagaatgctggaaaaaccatgctattgttccctaagactattagtgagtgcggctaagtccccaaccccctctcctcccagcctctgcctgtcccacagatagaaatggggcaggccctctgataaggaagcttgtcccttgaattgttcttttctcaggagattcacccttttcctttgtttcttgctctgttcacaaaagcaaagcatctgaaatgcaggccagagataaagtgcagcctgatgcaattagctgagcgcagcccacaggtcctaatgggatacggctcccgttcctccagcaggcccttacataggcgctgtgtgtcgtctgcactatgcgtcgaagccccaagtgttgcccagcctccgcatccacaccccctttctgtccctggcacagaacccaggagagccactctggtcagaggggctcagcagcaggccctgtctcccaccagctgggttcctgggtcaagtttcatcagaagtcaccgtgaggaccatggtcctcacctgagaggcctgcagatgccccggaggctcctgtgtgcttctgtgactgttcctggcaggcatccgtatccacccctcatcccacacctggttggggtctggctgtgctcctgggagctgtgctgactcttcccggggccacctctactgacacccacacctgtgcatatcccaggtatcctatcccaaccttgccagcatgtatccaggattttttttttcctattacatataatggccatagtaaaaaaaaaaaaaaaagacaaatacagaaaagtatagacaataaaataagttacccataatcctctcacccaagaataacatccctgttaacattttggtcatttccctcctacacatattgtttgacacagggatgtttacatagggaggccatttgtgtatcattctgtggcctgtttttctcattaaacattatgatgtaagcattttgtcatcaagaattcttagtacacatgatttttgatagctatataatattccattataaggctgtggctcagggagacaaatactgtcctggtgttttttttttcactctgaggtttattttttccttcatctacaaatctgaactagagagtgggctcatggagcagaaagcctgtctccttcctgcacagaggagctgagggtcccaccatccacctaggagcagtatctgagctatccccgccatgggcctcagctccccacttccccacacttcctccataggacaattgggcctcagaggctggtgtgggggcaggataggaaatgtataaagtccctcacctgctgtctgctggtggccccttggaaagctgtcctctcccatgtccaagagccagctagtggtggcacagaggctgggctgggcacacagtcagtactcagcacatgcccgataagttggtagcatctgtgtggttgtggtttgtggatggtccgagggccagagaacccatctcatatctcagaatgctcttcccgttgtgatagggcaggtggagtgagtggccacggagggtgacaagggaggcactggcttggatgttcctagaggcaggagcttagcagaggtcccagctgctactactatggcagaaccccctgcaattcccaccaaagactgggtggagggctgaggctctgcctctgaccctgtactcagtgggcgaagcttaggcaactggagtcttgttttggaggctaggtccctcctagggagtcttgttctggaggctggtctctggccaggctatgctcacctcctcatctgcttcccacaggctcccggcatctccaaaggggacagtcagtcccagggactggcgaccagcatccggtgggggcagacgcctatcaatcagtccacaccctgggacactgatgagccaccctccaaacagatgagagagagtgacaatccaggtacgtacctcatcggcagatagaaacgactgagcccagggcttggcgggaagctagaggcttcctggggaccccaactcctgcacagcaggtcttgaacccagggcctgcagaagccccctcctcaggttcagggggcaaaggcactgtgtgtaattccctgtgaaggagctgtccctctgcgtcttcctctgctactcaaggactccagagagcaaaaggagtgagaatgacattatcagggtgactttcaattgagtctagattcttttgaatcatcattcccaaacctgggtactctgattcataacaaatttctcgagtcatgccttccagtaaggtttttacttgctggtggttgtatgacaactggggtgttctaccctcggggactgggaattaattcgccagcttgtacaacatcccagcccttctttggacagctccagccataatgaatgccctctcttttatctcccattggccccagagcgccccctcaggatacacagaacacctcgatttggccctccacacaacagccctacaggtgtcaggagacccccttcatccccctctcaaagtcttggaataaacacaccaggccattcagccatgccccacagcccatagattccaggccctttgccttccaaggctttgctctgccccctgcatccctcttgaagtgcagtggccagaactcaacagtggtctgcccggcacatgcttccttcagcacctctggtctcatcactcctcagctagtagccacgtcacatgctgcttcaacagcaccccgagatgccccagcagctacggttacccctgttcatgtcctcacagttgggcttaggcagctgggtttggagacccaatagcaaggcttcatcagtgttcctgtttgctcttaggatctcttagacaccagcttctgttgctgaccctacccctcccaattatgttccctgcagacctggtcttgtcttccacgtcattatccaagtcacggattaaaatgctgggagcttggcgacatataactagagacttctctttaggtctcttgtacccttgggccattcaccccatcataagtaaatcacctccatggcactgtgtctctgtgtctctgccacagagtcccctggggccccacccattacgctttgaagttctgatgcatttttccaggctctctggctaatcctggaaagagcagagcttgggatgacatgctttggcttaagacacccaggctggctcataatgacaccacctcccctcttcaggcttggggacagttcccattagcagcacattctagaatcttgccattacttcacttatgtttgttggcttccagttctccccgacctctctcgttatcaaaatcataaatatgcgttgcacatgtattgcgtgccctgttctgtgcatcatcacaaggcttacagcaatagtgcctgctgctgaggaggaaactggctcgggaaaggcttgggcctacggtccctcagctgggaaggggcgatgcaggcctcgtaccgtggtctatgtgactccgagccttgctcctcaccaccagctggtggctctcccttggacagtgggctggtagtgacccgccatcttagctcctgccccacctcggcgccattttctttctgagagggagctcccagctccacattctatcctgtggggcttgtggtgctgagtggccccctgccccctactccccttcctctgtctccccatcctcagtgtacactgccacctcagagcagctgtgaaaaccaaggtaccatttgggccatggagacctggacccaggctcatttagtcagaggcatcccagactggccttccctgtcatggtgtctcccagtttccctcacaggcccccttaggtcaccccgcctggcacagctgacctcgcctcttgtgttggctctcaagagatgtatctggaccccacctcattcagccatatttttcttaaggactaaagtggggttctcttgtttcccccagggctggccgtgcccaggttgcttagcacaaggcctgccctccccagcaaggcccggccagcctttccatacgtcccccaccagggtccctcccctcctgcgaggaccatgcccggccccgggctctagcgccctcacctgagggcccagtgaacacccccatctccaccatccccttcccctgcctccctcagaggcgagcttgcagaaagggaggagaaaccccagcatttatagggcattcaccacatgccagacactctgctagttttgttttgttttgtttccaaatacatcttcctcattctgttcttcctggtagtcccctgaggtaggatttaacagatgagaagaatgaggctcagaggaaataaggacttgctgaggtcaggcgtggtggctcatacctgtggtcccagcactttgggaagctgaggcgggcagatcacctgagctcaggagttcgagaccagcctggccaacatggagaaaccccatctctactaaaaatacaaaaattaaccaggcatggtggtgcacacctgtaatcccaactactcaggaggctgaggcaggagaattgcttgaacctaggaggcggaggttgcagtgagctgagatcgcgccactacactccagcctgggtaacagagtgagactctgtctcaaaataaaataaaaaagaacttgctcctgaggctcttagctactaagtagcagagctgagagtggaacccaagtctctcaaagggctctgcttccttctctctgctctgctgcctctcacctctcccaggcaggcctcacttcctcctctgagccccgatggctgtttgttcgtagaccccctagcacacttatcctgggctgccatgatcacagattcctaatcggtcagttcctggacgcaggtgtctcgttcccctctgtgacctagcacccagtgcagggccggggatggtcagtgtttgttgaatgaaaatgtaaccggcagatgacgtttcttccatctcccttgcaggcacagggccatgggtgaccacggtggccgccgggaaccagcccaccctgattgcacactcctatggagtggcccagcctcccaccttcagcccggctgtgaacgtccaggccccggtcattggggtgaccccctcactgcctccccacgtggggccccagctcccgctgatgccaggccactactcgctccctcagccgccctctcagccactgagcagcgtggtggtcaacatgcctgcccaggccctgtatgccagccctcagcccctggccgtgtccacactgcccggtgtggggcaggtggcccgcccaggacccaccgctgtgggcaacggccacatggcagggcccctgctgcctccaccgccgccagcccagccgtccgccactctccccagtggtgcccctgccaccaatgggccccccacaaccgactcggcccacgggctgcagatgctgcggaccattggcgtggggaagtatgagttcaccgacccggggcaccccagaggtaagtcctgctgccacgtgcctccccacgggcctgcgtctgcacctccctgcgcggtcactgcaacaccaccgggacagggggtgcttcatgccagctccttcactggcctccccaacccagaggctgcagtggagcctccacctgcccaagacaactggcctgagatgggggagggagggggaaggtgtggagggcgggacaaacaaagtgggaaaatgcgccggggtaagaagaggaaggaagggagagcctgcaaagcccagagcccgtccccctccagcccaagccctggccattctcacctccaacccccaaggccaggccaagctgcaaaagggtgagagtcatccactcctctcagggcaccgcagaacagtccctttgggggccttctccacattccatccatgaggacattcagagcatgtactgtgtccttcccagggaaggcactctctgtcgtgccatcggatgagagcactgcccaaggcaatttagttaggcccaagagacattcctagaccatcttgaggcacttgaatgtttcatttcaaggatccaggggtggctttgtgagaccttgggaaagagcacctccagcctcagccttcagttaaccctcttcccccagcctcaggggagtttcattccagggaactcgaaggtagatccttcagaacagagcctcgggaaggatgcgtgctagacatggtcctagttggagcccccggtcttagggttagagttcttgatgtctgtctgagggatcagtccagactggaaggcagaaggggacaggaggaccagggcacacatatgaggcttgctggattcctctgctataggtttgcctagcccttagtgccccagacaagccaagtccctgctcctgctggatgcagtggggaaggctgctgggccactgccaggtacaggcagtgggggcataagggtccatggcaaacagtctggcccaacggggtgtctacatctcttttgaaagaggacactagacggtcccagaaagtatgcatctctgggcacaacttcccagccttcccacataaaaccccttgagatggcatttcggggtgctctgcctttcggcagagcaaggaaccccactagccactctcctgtcttctctcccaagtctcttcctttgtcatttcaagcaattttcatgccttgtcaagcatcccaacaataaagctcatgtctggatctctgttgggtttaattcccaatctgactgagccctaactgcctttgttttggaaatcagcactagttttaaatgacaaaattgtagaaaattacatctaaattctggtaaactcttgctttaagatcttttttaaaaaaatgactaaattgattttttctttgcattgttttggttaagctctgtctccctttaaaaaaaaaaaaagaaagaaagaaacttactcccagttcaagttcatgagttaccaactctgacaactgggcagcgggcatcctacttccaaggctatgccaaagcccaaggcaccgggtggcatattctgtccccacatagcccctctgggctaatgcaagatcttgctggcttgccacgttccaggcacgcatctaggaaaaggagctgttttgtgcaaaaaggtaactagctgagaaaggactggagtccctagtctggggctcagcaccaagctgggatctgccccaccaaagctgctgggtgcaggcagctaaacattgtcagccctgagcccatgagatcagaaagacacaggtggcggggacaggaccctgcaggacttctgtgcccactgggtcaatgaccattgcagagctgttcctgtaacctctgtgcaaggacctgagggtgtgaaccatcctctgtggtggtcctgagccaatggaagggaggggacaagaaataggggccctgctaagattccctctaccaggccccactgggcagaccgagggccaggtgtgagggccagggatggggtgggcctagaaagtgtcctcagccctgccttctggtgagccagcgggacccaccagctctagccagtgacaacaactgaccggtccatcaccctgatttccagaggttgccagcacactggctctttcctcgaaattccatgtaactcgcttctctatttacggcctcatcagctgatggagccccttatatttgcagggaagaaagagtgacgcacgcgcctacaaatgcctccaaactcaagcctgggtgggttttttctttttttaatatataagtaatttctcttttcatttctaatcttaaaagcctttattgctgaagctataatttgtctgtcagatctaatgtcaaacaactgcatattttttaaaataagaaacccgaattttgaaactaaatctttgaaacttgccatgtgagagtcgtgttcctgacaggaccaggtgggcttggatctgggtcacttttaattttgcccctagggattttacatctctgaagcccaattgatttcacactcctaaatgacagacagctggctccaggcaggaacaggaggctctgcgtgatggcgtcaacacaagtcagaactccactttagaaaaaaaaaagaactttccttttctcctgttctctgtttgaaaccttgcccagcattataataagatccaccatgcaatgccttgagatctagctcgttaaagtccccgatattccctgctattgtttgacgtgacaacctggcctctcccggggttgagtaattatggggagattcccctccatgaagaacaggtcttgccagccagagggatgggccactggtatttttagacttcattagtgcccagatttaaaatttcacattttgtttcttgtaattatcttctgatcgactgagctcaaatttcagttggggccctattagtctgcctttccaaaaagggcgttgggactttaatttaaaacttaaccagttgaaaaataaaggtggcgtggaaatgctttttgatttgcagtaggtcaagcgattgtctctcatctgtgactagagaagccagcttgtgtgccattcactttaatgagtgttatttaaatgcattgagcacatatagattttcttaagaaacttacaagacaaatctttctttctctaagaacaatttgggggtgggagcaagctgtaggattttttttttagatgatgtattgaaagctaattaaaaatagatttcatgtgtgcaaagtgataagggaggaaaaaagaattcgttccatttgaatcctgttatgaagtacctaagacatttgtctcgttgttggattggaaccaccgagctaacacatggggagaggtgtggccaagctcaggcctcggtgagacctggagtcagtgttactaccccaggatcccgtgaacccagctgtgcgtgcctgatgacagagcacaggctatgaatgcagctatttctacccctgccttctttggcaaacagtttttggtggctcagaggatgtatggggaccttttaaagccccaagctccaggcctagtggtgagctgcagaaaggctattgtgtcttcacctgcgtggctgggagtgaagagtcaggctgcacctgctcccacctgcttctagaccagaaagcaaagcccgtgtcaacctgagcagggaaaggtatctcttcggacttcatattttgcaggggcctagggtgaggggtcatgaggatccatctacaggcttgtcctcccttctgggaggccgtactgggagagagggatggttcagccccttcctttggttctccagctcctcccttcctattctggcactggacttccacctcatggcacaccattcatcctcgctgctgcattcatccctgtcttcacaagtaacagtgatgagatcttgtgaaaatactttgaggcacagggaatagctgtgtgactgggacaagcctcctcacttctctaagcctctttcctcatctttaaagtgggggtgacagtaccaccctcacagggcctcagggaggattgagtgagattgcggacatgtccgtacatagcactgtgcctgcttaccccaaaagcagctctggctattgcctctggtccagggtctagagagttcagcagagaaggaggctagggaaggggcagaaggccaggccctccccagcgcagaggagatggaagaagcccatgcttgtccacagggctggcaatccctggtcaagccatttaacttagggatggggaccccttccctaaaagggaggtgggatgcatcccttttctgtcaggaggactcaggatggctctccccaggtgtgaggcctggcactgatctcatctctccttgccccacactctgacatgtccagggcacattgttccttccacagcctccataaatattctggaagaagctgggaatgcatgataaagctgttcgcccacactcaggccagaggcacagaattttatccagactgaaactgtcttcccacagacctattcttcctgtgtctgtgcctcagaaatgccaacatgaattcattcagggttcagactcaaggcctgcgttgtctgtggccagccctttgtccacctctagcactaagtctgaaaactcaatcgattcaggtttctacatatgtcctctgctcttctgtacccccaccaccccaccatcaggccaccgtcacctctggcctgcacactggcctcccagcccacagtgcattccttccagtctggctctacggtgctgccagagtgatttttcaaaatgcaggtctggccctgccacaccctgtccaacaacccagttgctctggggacaacggccagcgctgactcggtgcttgccaccacttcatcctttgctgttctgcttgcaggctgccccgtaaccaccccaggccttggctctccagtctagccgtgcactgtgcctcggtcgagtgcctgtgagaccattcgactgtgagccccggggtcaggggcagcaaggatgctatttcatccccactcccccctcagtatccaagccggtaccagcactcagagatgccccagaagcgtctgatgaatgtgggcacaaagcactgagctgagaatcacccaccagggttctgtgacttccccttcccttcacatgaaagcaggtcagtgctcagggccccaggcatacggggatggaaagtgcccttaggagagctcgttctgcagcccgtcaccccccgacacctgacccacgcctctggggacagaagtccatctgtttcaaacttccttctgcacccaagcacctccactatatcctgccccagaccatacaggctctggaactctgcctcagtttcctcatctataaaagggggagaagactagaacccacttcttacagtcatgaggattgagttattttacatactcgtaggcttagaatattgcctagcatgcaggaatcactataaaactgttcactgtgattactttactggtaccagggccatctttcagtgtccgtggccttttaggggcccaggttaatgagtcccaggagatatgacatttgaaacacctagctcccagggcgtccaccgtgaacagaagaaaatccccttctcccattgtaacgtttgacaatcctccactgaccataacaaccggaaggaagcagcctgttgctgggaacttctccctaattccgggagctatctgtcttgggagagctcctcctacctcccctcaggggctttcagtatcccgtggcattcagctggataatcagggtgccagggacaccgccggggccaggtcctccatggccacgtcaatagatgggaccaaaagaattctctggctcctccagaccaaacagccaaggctgcaggcagagagaattgattgtgaggatgtggcttgcagcatggatggtggttgagagcccagattctgcagcagactgcttgggtaaattcaaactccacttcccactaaccccatgaacttctgctagaaaaagggtgtctctaagcctcagtttccacatctgtaacttggaggtaatagtgccatcctcacagacatgctttgaggattaaataatgtatgtaaagtcttaacccagtgcctggcacgtagtaggctcgaataatattagctgttgttatgaccactactgtaaatcctaaagattcttggaggagaaatcgggtctggagcaccttagcctcaggaccaccactgcttttaaagcaaggttgtccaaaataatctcccaagtctgactgaatggctcacaacatggatctgaaaccaaacccccatcccacccttgccctgactttccagcccccactcctgatacacacaccctcctccaggcagtgtgtgtctcagagcccgtggaattcgaaactccatctgcacaaggttcttcgtcctcgcctgagctgtacctgccccagccctgctcaggaagcctcctcccctcgcagggctctgtcctcatggggcttgttcatcagtaattggagggttgtccagggcttaacggttttgttaacagatcatttgactatgagtgaaccaggcaagcggaaagatgccgcagaggccgctggaccacccagggatggtgtcatcctgggagcaggaggtgacccctggctgccccagcctgctcagcagggcacaggcagagagaaccaccctggaccctctctccacggggctgcgggagcatatgggccttcagccccaaatctccgctgagcatcttcaaggtcagaagccctgctctggccccagttgtctgacagggccagaggtcccgctgccgatggggatgagagggctgttcagacgagagccaagggtgggaacatttccttcctgggggcttcaggtgatggtgctgacccgtggcaggaagccagctgccctgatcccagccgctgtcttccttcaggagcagcaggccccagcagacaccggcagggtaacccgtgaggttccaggtcagtgacacacggaggccactcaggggcttgagtcatgtcccctccctccctgctgcaccaccaagttcttactgagccatcacgttgtggtcttaggcacctcctgtgcacagagcccacgtgtggcttctctcctgagccaggcaaaagaaacaggcagggtgccaactgcatgccccacgtggtctgggttcctgtgcacatgaggcctgtggccatgtcaggccctgggagagaggtgcaagtctgccctgggggagctggggagaccaggaggtgccagcaataagggcctcaggggctggagaaaagaggggtcaggttagagcctgcaggaaagttaaggggacagtgagtggttctacaaatgccagatcttaggaaagaatgctggagggaagtgccagggacacagaattatgattttccaatagatccatctatcatagagtcacacacacacacacgtgtgcacacagtttgcagggcctgtcctgatttgagatagggtcagctagtgagttaagtacaaaggcccaagccatccctctctctcaatgcttggcacgccaagcccggggagcctgctcgggctacttagctgacgtcttagcctcatcagtcagtgtttgctggggtagcaacccaagatcttgcacaagagtccatcatctctgaggccatactggtcttgcaaggtgaagacctccttgattctcaggggctttgacctgggtagaaaacactgggggccattaacccctgacagggaaatcaggtgcacatccatgggccagaacttacctgtgcacgccgctttctcctgtcatgacaggggtttaatgtcgagtttcctgttgcctaaccactatttaaacatctggcatctgctgtttgtgccaggaaaagtatgccatgctggactgagccctagagttttctagaggttgggaggagttttgtgagaaggtgagccaggccatggcgtggtatgtgtgccgcttgtccccatgtgatggagagggaaggacatcatggcaccccaaataggaaacaaaactggagaaaatgtggcacaaaactggttcaatgagaaatgatctggttgaaattgcattccattcaagagcacactcactattctagaaatgtaaggggtaaaaataatacaagcagagtattttaggagcataaaacattgtgtaaattgcttgaagaaaaaatggctgaaaggtcgccatccattgaaatcgttgtcattgcctgttttcttcatgtaactctcttctttaaaaaagaatatatgtttatatttttaaaacatttgtattatatctatgttcaagggaagcccaagtgttttcagtacaccacaaggcaaatgctccttccttttacagtgtcctggcagcctcttggatgactaagcacagactaagactgtgaacagtctggttctgcccacaggcctctcactaccttgccctcccctcttgcaaatgacctctcggtgtcattgcttaatgcctcagaccaaggtctacacacaatgccggtgtgtattcgtttttcaccaacatcagcaaagtcaacgccatggctacatcttagtctgctagggcgtgtcttccctggtcatgctccagcctgtcaagtgccttttaaaggaacaccaggtgacaggcaaggtggcccagggagagggattgtcacctccttggtcttgagcatcacactgtagatattctgacttttcattttgtgctgccatcacaaaatgccacaaattgggtggcttaaacaacagaaatgtattttctcacagttttgcaggctggaagtccaacataaaggtgcaggcagggttggcttctggtgaggcctcgattcttggcttgcaaacagccgccttctcactgtatcctcacgtggcctttcctctgtgcatgaacactcctggtgtctcttcctcttcttagaaggacagcagtccgactgggttagggacccaccctatgacctcatttaaccttaatttcctctttaaaggccctttctccagatacaatcacattggggattagggcttcaacacaggaatttggggtaggaggggacacatttcagtccgtaacagtctacaagtctgtctagttggcaaatggaaagggtagcccctcacaaggcacagttcccatgtagttacaatgtctgccttctacctgtgggtgttttcagtgattcgcttgaacattttcataaatgcacttttgccatttttatcctggtttagctacaggctgctccctctgctttgttaactaagcattggatatatttcccatgattagcatcatccatacttggggttaattgtttttccatagaactttcatgctgggagggaacctaccgtcaccactgggaactaagcaggaaccaccgatcgctagacagtttgtcctgttaaatggttaagagctgtctcttcgtgtaacttccatggccctgccctctggagccatccagagcaaagctggtccctgttctacatgacagcccttcagcttttggaggatggcagaatttccttttctccaaaccaaagatctccagtggcctcagctgctcatcctgtgaagattccctttaccatgtgcatgtcctccctggtcatgctccagcctgtcaagtgcctcttaaagggataccaggtgacaggcaaggtggcccagggagacggactgtcacctccttggtcttgagcatcacactgcagatattctaacttttctataataattgtggcttatttggttaaaacacacgtttatacacgcagagatatatgaatatacacttaaacttccaaatgaagcgaaaagagaaaaaattgtctccagagtcctgctgtccactcggctgatttctttggtgtccccacctcctcctttttatcaggatcgagattgttggtcattcctttttgtagacacccccagccccaccttcattccagcagctttttgcccctaacttgggagcaagcgaactttctgaatttttaaattatttccttttgaagtctaggaggtaggtgtgtctcagcccacctaccctacccccatgccccagccgtgcacgctgaagcaactcaccgccttcctctctgctgatgggaatttactcccgagcagcaacccgtctgctccgttcaaacccttctgcctccctcgtttaccaccatagtgaatgtcagagtaggatgctacctacagtcagccaggaaaacctcactttacaggtggggaaactgaggctcagaggtatcacctagctatcacatttcccccagaaactgtcactagaaagctccctgtgaaaccacccctattccatggtgccctgtggaattgcttcatttgctgctaggagttgtccatctgagacctcttctttcctcccacagaccaagaactctacagggacaagcccagcatctgcatgggccgcactgggccagctcttaagcctctccaagcttgcccatgtggtgcacgctgccagcctctgggatcagagcagcacatcccaccgggagccctctgtactcagtggcagctccacaaggaatgaatgggaggaagaacagggacaagacacgcaccactcacaggggccgagtcatacatgacgcacacaggcaaggtcagccagggccacagaggatgatttgatgagggaggagacatcatcccaaaaggagaggaaaaggtgacaagggcaaactctgactcgagaatatgggagcccccaccccatcacttcccatggtcaggggcttctctggaattcctgcttggcaaactctcctgggcagatttccaccctccaggtctctacaaatatcagatgagtgttttttgtggtgacagtggttttcaaaaacgactcttatatcctggttaaattgcccagcttcggccaggcacggtggctcacaacctataatcccagcactttgggaggctgaggcgggtagatcacctgaggtcaggagttcaagaccagcctggccaacatggcaaaaccccatctctactaaaaatacaaaaattagccgggtgtggtgatgggttcctgtaatcccagctgcctgggaggctgaggcacgagaatcgcttgaacccaggaggtagaggttgcagtgagccaagatcgcaccactgcactctggcctgggtgacagagtgagactctgtctcaaaaaataaatttaaaaaaaaaaactaaatcacccagctccttcctgggagcctgaacacctagtcagctatgtttctccagtggagtccagagcaccttcgagagccagaacctggcccagttagcatccccggctttccttgctttcttttcaaaccccaaatagaacctgttgctgcagacctcacacgcccctcagtttaggaattgccatggtgattctgaaggctcctaatccatctgctcatgtgaacaggcaggtttcaggaattgattgatccaaaaataatttctatattttcagtctttcttttatatggagatattcattaccttcaagattcctctcccagaaagcagagatgtggatgtgtggcctccccctgggtctttgtagtaatggtgccgcctgaggatttgaagctggccctgctgttggtcttgggctggggtcgggagtgccattccagggaagccggtgggcagggctgggagatgcagccttctcttccagaagggaacagaggttggggggggggggtggatgttttgtatgtgcctaccactttatattcattgtatattcaccccgtatttatgtattccttgcatctgccctgagaggcagagtcatggatggaaaaccaaggcctggcttaagaccctgcccaggtatagctggtaacgtgagagtcattctcaagactgcctgcctccagtgcccataccctttccgccacaccacaccttggggcttgctgttgtagcctgtgtggtcactaggcatgtctgggctaaggacgggcaagtcccacaagtggctgtttcgtgtctcctgcagtctcctggctgatacttctctgtataagctggtgattcttgggctctttcctcatctccaaaaccgttgttgggatggctgggtggatggatgggtgggtaggtagatggaattcccaaagtaacacaaggggcattgggccatttgaggaagctgcagacagagcactggccaccaccaaagccactggagcttgggagtcaggcggccctggggagtccttcctgttgctgcgtctcccacaccttaatcagagcatcgccaatgcaataaagttaatggagccagtcatcctatgaaggagccaattccgtgcaaagatgatacatctttgaagttgatgaggcctattaattgagcttatgccctttaaaatgaattagattcttgaaatctaccacacagcagtacatccatttagtgtttctgtcaccgaggaatgaggagccaccagcacagagctataggaactgtcttcctgctgacatctagcatggcctacggctccttgggagctccacagatgtcatgcctggccagccattcttgttcttagcaaattccccaaatcggcataaatagctccaggaagaaagtgataccgatgatccatgggcctctggaagcgcatccagccagccctcagccattagcccctacctcaggatcagttagcagagatgcacaagaatacagctagactgccagcacttcaaaaatggccactgcacaggtggaactggtgcagggtggtccccgggctccagtagggtaagcagacatggtttccaggaggtgtgtagacctggaactgactgagcagagtgagtgcagtcagtgagctcagtcagtgactgagcagatctgactgcagcctgaacgggaatcatcacgcggcatcccctggacccccaaagatgcaccgaagctctgctcagtctcagactcctcccagttaccaccactcgcagttgcttaagagcacaaagtggcacttgttttgcccacagaacatctgctgaagacaaaacttgtgtttatagctcttcacttcaaaagactggccgtgttataaaaagaaagggaccatctgtccctcttctggaccccagcgcctcttggaagagatttctgtgcaagaaggcagtgagaagtcagcgtcgacttcagggaactattttggggccggaaaagaatagtgcctacccgccaaggggaccgtcgccggcagatgaaagccagctttgaggaggccatgcgatgggagatgctggcccggaggaggtgggctgtgcgccaatgatgctgcccagatattccagcagagcagagaccccagagcagagaaccaactggcaggaccgagggatgtgagggaaggcgaaggggaagggctgtgaggcactgcagctcccaggagcaggcatgagaaatgtcagcaacagcttgctgccacgcagagtcagatatcatgtttgcatcacccatgtgcgttccttcacccgacttctggggccattcttatctgcaaggccccttagggcagttctgcctcttgggaacaccttaggctgagtgatcgccttcccgtggctgagagctgagaagttcttccagactgcacaggtgtccggtctgtctgtgatgcccgcttaagactcatctgccttaagcccctgggcaccaatatagaaaagtcatgtgagtccaggagaagctgggcggaggtgaggtggagccaggattagcacggggtggggcctgcagaggggaggaatttcccaggcttcctggccggcatctcccaggctgagcatcttccagactgaaactccctaagaagggcttggccctccccgcctgcacggtgtttcatcggtttggaacagtcctgtttccttcccctcccctcgtccccaacaggaaaaaaaaaaaaaaaaaaaactggtttctaccatcatccatgcacattccagaaatctttggtctgtgaacctctagtcttagggcttactttgtttcagatcaaaacctgcttctgtcctagggtggaaatgggggtttggggagtagaggccagaagtggggtcctctgaggacaccccttactcccttttcctgcttgtctctgacaaggcacccctgccagctcttcctgggccgaatgaatttgagagcttcctgaggaaggtttgcaaattttcagtggcatccttaaatgtacggaattcccccaacccgggcacatgcatttagattctgaggacgaaggcagttcgtgatgtagcgtattcaaggctctcagaatcctaaaaggtcacagtccttttattcttgcctcttttcacttctttactgttcttattgatttatttgggcacataagaaaacacagtaggcaaagcccactacttctattgaaataaagtattctgcagtcaaaccacacaccataaagaaataattgcagtctgtatatattgctaatggacatctctcagcaattccctgtctcataagctttaaacacagacattagtataaatatgcagaaatccccattcgggcaaattactctgcatttctgaatggaaggaagattaaccatgtgctgatatcaagctttgaaggagcccagcagagcagaaagaattcactggccctctctgggagggaggttgggactccctgagagagttttggctggcatctcctcaccccctgggcccagtgctcccccagagcactgagagctgtgcctcgggagtgggggaccggcctcgcctaagaaggctggttggtcaccgggatgtatttgctgagccttccgggctcctgaggctctggcaggagcaggagcaggaaggctgaaggtggatgctttggcctggcctctcagctgcctgacagaagcccttaggggtggtccaggcctctgaggccaatgggctttgcggagccacggggcagttcgtggagccagctggctgtgcgtctcagcccctcaagctccatggcacccagaacagcctgtgagctccctttctctgtcccttctccatgcttggccctcctccctcctccctctcctgcccactcctcctcctcttcccatccttcctctaccctcctccccattgtcctcccccaccctactcacacccttcaagggtcccaccctcctccaccaaggccagctccagggtgggggcctccaccttgcggagctcccagcctgtgccaccagagccgaagccctgcctgagcgtcatgggcttgtgaggaaaaccccctgagccctggacaccagggtggggaagatgcccccgtcagcacaggctgctaagtctggggctgacagggtgacaagatctggcctcaccaattgctgattagaggggggcagcagattagagggcaggcagcctcattcgggctccccacaaggctcacagaagcaccccccagctgctcagcacaggccccacgtccccttgacactggccgtggctcctctgcccagaggcatgaggctccgttcttctgggccgaagcagtctggaggggaaggggaggtggccgtccatgaggggccatctcgttgtctgtcatgggaggtgaatgatgagccagtcaggggccgccgctgccaagaggccttccggttgttgagtttgtgtccgcccacctttcccacagcggaattgagtgcagaggcagaggaactcacactgacatgctgacgcagaggaaaggggactttggcctctgggagctgaagccacagcctcactgccttgcgccgctcaaattgctgggccggtcagagggcctgggaaccaggtctcctcaggagagacccgtgaggcccagagtatctgtgacatcccggttttctggtcagaattcggaggccccagcctcagcgtggaagagtaagcctctcctcagctcaccccagcgcagcacagccttcactcactctccccaccacccagcatcttgatggtctattttcatgtctgtctcccccactcaactgtgagtgactttagaacacccccgctgctgaccgatttagcaactgtggatgaaatgtaaaaaggtacccttttctaggacccttgctgccacctaccagaaaattgtcataacgaaggaaacctaggatgtgcgggagctgaatggtaccccctggagttgtgcagtgtgcaacttgagcaacccgtccgcagcggcgctgggggacttactgagcttattaccttccagacactcttctagcatgttgcatatgttgacccatttaattcttacaactctgaagtaggtatgttcatgacctccgtttacagaggaggaaacttcggttcagaaatgtgaagtaactttcccatgcttacccagtgggtcagtgggtggacaccaggcagttgagtgtcagcagggtcctcagccccagagccttgtcctcaacctcatcttcacttccattctcagcgccgagtcccggatctggctatgtgagtgcttggcaggtgcgtgtccagcgtgaggacagaggaggggcctggcttcggctcagttcagctcccgcttcccccaccattgaacctgtttccccatttggaaaatgagcagctggtcccagatcagaggaggtgccctcactcatacccaactgtgcccagggctaaagagctctgagcctccccatgagatcatccagcccaccaggcttcctccccagggcctcctgcagccaggccctcctccaggcctggccagcctctgtggtctcagttctccctcccacccctcagggttccctgggtggcgtgctgcctcctcatcttctccagcctccatggtcagagcaatcttcctaacgcaccacctggccaggccctcccctgcttggagcccttcaggggtcctcctttctcactaagcccctcacctgttgctcaggccacctgtgcaccacagcactgcacctgctcacagtgcccctcacaccacccctatctagacctatctttagcctgttcctcctccagaaaacttccctggacccccacaccatgtggaagccaccaggcccaagtgccagcctagggcagacaggtctcttctctgtgactcactcttctctccaaggtggagggtcttggggtcatggcctgggccagagaccaggcaggcatggaccaccccctgcctcaccaactgaaagacagtatgctgacatcacacctggctttacgtaaggtggcttaggtcacctcagctccctgttgcttccccctcagcctgtctcttctgatttacacaggtgctctcaccagagccaaggcagcttgccctccctgggaaagtcaagtgtgggcttatcagggttcccagccaccatccctggaccccctgcagctgccaaatggaaaccagagcttccacatgaggagctgccaaaaacaggtgttcaagccccgccagagaggcctgaggaggcaggagaattccaggaaggggaacactctgtcccaacaagagttggttctcatagccaaaaagggacaaggggcacagataactgtccccacagcccccagctcaccaggctccagccttctgggagtccagcccctcccctgtggcaggtggcagttggggcccacatggaagctccaggggttccccagcctcttcccaggtcagtaagaaggcaagaagctggccgggcacagtggctcacacctgtaatcccagcactttgggaggccaaggtgggtggatcacctgagatcaggagttcaaggtcagcctggccaccatggtgaaaccccatctctactaaaaatacaaaaaaaaagtcagccaggcgtggtggcaggcgcctgtaatcccagctacttgggaggctgaggcaggagaatcacttgaacccgggaggtagaggttgcagtgagctgaaatcgagccattgcactgcagcctgggcaacaagaacaaaactctgtttcagaaaaaaaaagagagagagagagagaagccaggcattgtgtctcacacctgtcatcccagcactttgggaggctgaggtgggaggatcacttgaagccaggagtttaagagcagcctgggaaacatggcaagaccccatctctacaaaaaacttaaacatttagctgggtatggtggcatgcacttgtagtcccagctatttgggaagctgaagtggaagtattgcctgagccgaggagtttgaggttacagtgagctatgatctcaccactgcactccagtctgggtgacagatcaagaccctgtctaaaaaaaaaaaaaaaaccatgaaaaatgttttaacaggagggaagcccaacctcagaaggtcccaggctcctgacaaggcgccagctgtatccccacccccagacagaccgcatctgcacacctggcatagcctccccctgcgttcgtcacagggccaggcccctgccctgctgagctgcacctggggctgggcccgaacccctcctggcatgggcagtggcagagggaacaagagtatgtaatcctgctcctgggaccaggtcagttatctggaaggacatggctttactcgtggccgagtagaggtgcccccacagtgcccctgggcacttgtcctgggaagaatctccaaacccatgagcaacccccaggcccactgggaagaggggaagagagatgatgagtcactgaggcttgaggccctgaaaagctatttgctgggagctctggagccaactgcccccaaatgcatgctcgagaacatctctctatggctgccctgcactcctgagccagccaaacggtgcctgcccttgtataggaggagaccctgggcaggtcgccaggtatcctctagaatccatgctccaaggggacagccagttgctgtatccagcgcttggcacatggtagatgctcagtaaacactttttgagtgtatgagtgaatgaatagctccagctgaaaggatgagtgctgcccacagtactgaagcacaagctccaggtgctccgtaggcatcagagcagggagggtagaacccaggaggatggggcagctccagcaagggtgcagagggggctctctgggctcctagggggtctttcagcaaaagtaatgctgaaaaattttgacttacagtgatcagcttcaatggtcttaacacaaacttcatctcagtttttctgccctctcacatcgtctcgtctagatatttttgtaggatttaaccctactgtcttactatcgcccaccaaccataggaaattccctttttgatggatctttgctctgtgcagggccacgtcgtgttctgagcagtgatcaagtgttcctctttctcctggaggcatttgttgtttgttgatcaatagatggtgggggctttggccaagataagcctttggccatgcgaggccttgacagtttctaggactgcagcttctgctctctggcggttgagttcaccagcccctcctggggttccagcccctcctggtgggcgcttctggccttccctccctccccaaaggcaagaggcccccttaccacctgaggagagagccctgcccggcccccacttccagatccccctgggttttgccttggctcctccaaggggtctgcccctcccaggggtcccacccagctcacctcccgagccacctctccccagcctgggcccacctacagactgtctatggtgctccttggacttgggctttaccttcccagggaacccctaaatcttcctgggccccgagcctgactgcctggggaagggtgagcaggaagcaatgaaacacagcggtgggttgaaagccgtaaatgcaaggctttgaattaagcagaaccggattcaaatctccactctgccactcactcgctgtgtggcctgggaccagtgactctctgcgcctcattttcctggcctgtacaatgggggcaatctgtcatagagctgccctgaggattccaagagtggatctcatcagcggtctccgagagggtggcaggtgggaggaggcgtttcaaagtgctgggcttcccctaccgcgccctgctcctcgctgctcctcgctactcccagcccccaaaccccgcagctgaggacgaatgctatggagtgagatagatggttgcaggcacgaggcgggtgtcatgaaagcgcccctttggcccagtagcaagcaacccagaagtgtgcttatcttgagtttattggggtttccaggtaggggtcccctcctcgcctgccttacgccccagccctagagcccttgggtccccgcgggctggggcggggttgcctgtgcccggcaggagaaggaggtggtgacgcgtccactcgggccgccccgcggctccgccgtcacgtgtgccggggaggggaccaccgggaggttcccgggcccgcggaggtggcgcgtctgcgagcgcctatttgcatatgcgtaccctggatatttataacttctcttcagccagttccaagttattgatgtcttaaagtgactttaatctgagccttcttttctccaaatgggcttttgatttccggagtgatattatacatggctgtaagctattgactgagcgattgccgttgtgttctcaatgtgctgatgctgaaaatctgcgatataaataaacttcctctggtagaatcattataaagcacaagcagcagaaatttatggaaagaacagattaaatgcttagacttaaattcttcagtgtgctggttgccctaaactgctgtgtctggagtttgggctgctgattcaggtggaaaaaatcaaacggacacatcgcttgtcggtgcatttttactatgatctattgtgttgccaaaagagaaagctcaaaagctgccattgataatcctggttaaaacttggaacataaattattaagacgtgtagtttcttttccgagtggttggggactggggcgcctggcacactacagaaatataacatcaatatgcgcttatgcattgtaatgcgggacatttttatgcccataataaaacattgcgcctacaactatgtttatgaaagcaacagataggaagatccgtaatgccacttaatagagttaatcacctcccatcggaacgttttaaaaagctttttattgcatgttgaaaagccctgaccatgattaatacactgcacactgtcaggtgccaatcagatggctcaaggcagcaaagggaactttccagcacactggggcagggagggttcttgggactctgtccaggtgtctcagtgccaggattttaggtcgacattagcctctggttgaactatgtcaaacattgggctctggctggggctttgggttctaaattttaagctctgagctgtggatgtaaattctgagtttgttcctgtctctggattctgggctttggactggcctggggtctcaactctagatcctgggtgaccctgagcaagatcaccgcacagaacatgtttacccagggccaggaggcggggatagatgtttcctaacagtcttgggtttgtttgccatcagtttgatgagtccagttgaccataaacctgtatccagtgggccctccctgcacctctccccttccagccagttttccacaaagaggagggcagcacccacggctgtgcccagggctggcatgtgggtgagggccagtccttcaagacagcagcctgccatgggacagaccccagactcattggcagggccaaccaccaaccagccaggaggctccggggccaatcactccccttcccctccaaaggagatgctttatctcctttgtcccttttcccacaaccacagagtgacgggagccatagggaatctcccaaacagcctagaaaagctgaggaggtgaagggccagcctgaggtaattaaagaataaaattgccctttaaaagtgcacagagatagtgctctccacggcctgggcctctctcacgtgcctgggtggtgactcgggtggctggtggctgagctagagccgctggtactcagatggagaatgttctgagtgtgagagctctttttcttcctgaaaagttggaccaacaagaactaggagtgaggacagtgaggccagcctgtgtatcctgacaccacatggcagatttctctccactggactggaatccaccttgtgttacagcttgaagggctggattgccaccaggggcgcagggcttggagggatgtgttgtctccaggggcccagagatttctatgcttgaaaagttgctgtcacaggcctttggtgagacagaatcatacctgaactgacttctggtgcccaatgggacactagtcattcaaattccatcatggcctgaagggtttgacacccctctgccatctccctaccaccagtacccctgccaaaagtgagacccatgcttaaatgagcttaccttttcaactagggaactgtcctggtccattttgcattgctctaaaggaagacctaaggctgggtaatttataaagaaaagaggttgatttggctcacggttctgcaggctgtacgggaagcatggcaccagcatctgcttctttggaggcctcaggcagcttccactcatggtggagagcagaggggagcaggcatcacaaggtgagggcagacagaagagagagggaaggggcaccatgcttctttaaacaaccaggcctagcatgagctaatagacggagaggcctctcatgaccgtgagagctgcaccaagctattcaccaggggtccgcacccataacccagacacctcccaccaggccccaccgccaacacatttccacatgagatttggaggggacaaatatccaaaccatatcaagaaccttttccaaatatgagctgtatgctgggtccatgggggacactgtccattcttgccctcttagagatgagtaccttggtgggacaggcccacacctcaccccaagttgtaaagtcacaaggacaactggagaaaatattgaggcataggtgttgtggaggaaaaactcattctatgcatcagtcaacaaaaatgtactgagcacctaccctgcacaacaaaccaaactccctgccctcagggggctcatatttgagctccccaaagcctcccaaatgatgacggcatccacatcccagatgcagcaactagagaaatcacaagttgcgtgtgccttttccaaggccgcctaagacaagctgagcgaggatccccaaaaccagggcaggggtctcgggtggatcttcagagccacatcccaacccccttgccaagctccctccaccccaggcagcaactagggcagtgtgcccagcctcggcttggggaggacactatagtgtgcggtgacctgtgggaagagagcagttcctctcagtctttctcggggaccaaggccaaaagccagcaggttgcagaagttgcttatcctggaggcaacaaagcaagggtgccttgaagttatggagaccatgactgttccgcaaagcccggcagaaggggttgcaaatgagggctggatatgcaaggagagtccattgaggaaatgtgcatggggcactcacctctgatcgtgactgagcgagtttccttctgaagtccagtgcctcctgctttatgaaagtgagctgtagggtgtggtcaggcagacagcacatgtggagcacccaagatcaagtgctcagccacaggctggcccacccagactggcacagaggtaaaggcagcccgaccctctgtggtcacagctgtcctcccagcagctataaggcacctggcagttgccagggcccttctctctgtgcccagccctggtggccttggagtgcctactgggcagttgctcccaatccctccctggccagtggccttgagagagccctgagtcctgagtgagtaggggagggggctgtggtgggcagagtcaggctcagtgaggttccctgggggacttctgggatgagtttgctaatagagatgtctgttctgggaggtcgtgataccacctgtcattaacccgggcactctgcccggggttctcaccaagaattcataggtggctgcttgcaggcgggtgagtgatttgcaaggaccacaagaatatttgcataaacatatgtatggaagtgtgtatttatttgcattcatttgcataaattgctggctctttgagctgtcgttccttaattttatttttttcagtaaatttctttgcgctctgagcacagatccggacactttgggagtgagaacaaaaaggcaaaaacatactcttgaatcagaaacttgtggggtgaagcctgagcctcagtatgtttttaaagcctccaggtgagcccagtacacaggccaggaaccaatgtgagacaggacaggcctatggcagatgtcagatcagatcagcctccctcctctgggcaggtcacctcactgcacctctcccaaaactcaaaagcaatgaggactgtgaagtgccagtgccagcgccagcacgtggtgatcacccagcaagtgctcaccaggccctgctcagcgtcaccaccactgcacggtgccatcctgtgtagacccggctgctcctcctggccctgccacccagggccctggactccacccctaggaccctgagttcatggatagtgcgtgctccaccctggggcccggggtctgttctatctgaggcacacggtcatttctccttcgaggtgacttccaggttgacagttccatcactgcccagatgcctgggaaatgtatgcttgtgatcgggagaccacccagccccgccgtcctccctctgttcctctttccaggccaggagcgggccaggcactgaggcttgcaggcttttgctttccctggtaggcgctgccgagggaagaagaacactggatttctggaaatgcctaaagcacttcagttcagttgttgccacggtcctgcccctctctgcgttatttttttctcctcctccctgtttgacgtcttccctccatcgtcccgcacccagctggcccaactgtagcatccctggtcactctgtgcttccctaccttgagtctctgcttgtggatagcccttcctgcatggctggtggctcaaaccctgtccattcaagacccagctcagtgccgtctatcccacagcatcttctccaagccagcacctgtttccctcaatcactcattcagaccttacctgaaacctacctgaggccagaagctatgccaggcactggggtgcagagactagtcagatgcaggctctgcttttgagagctttcctgaggagtgagagcttttcggagtggggagcaagtccatgactgcccccaccccagcacctacctttgcacccctgtcgaacaggtgcaccacattggaggatgctgctcagagcaatgttgcagaccttgctaacgggagacagaacagtcatacctcggcctgcagaagtccagggaggagggaagtggtttcagaagttccaggggcagaggggaacagataggagctgagggggcagcttctggtggcagccgaggtggccaagcccactcctctcctggatccacctttgccgggacaggcggggttcttcctggaacctcagggagccccagagcttggtttgcagaccctcctgatcccccaggccagccaggcctggctgcagcccccactcacccagaccctcagaggtgcatggtccccactgctgctccatcaaggccccgcagggccaccctcagtcccttcccctcacctccaccctccagaggcagcacccaccccgagagggagccagcctgggcctccacagcagagtgtgggagcccagagagcccggaagtggcacagcaggggcagcgttattcatcaccgaggctgagctgagcaggaaggctgtggcccatggtgggccgagcagcaccttcctcatccctgggccgggggctgtggagtctaggaggacctggtcctgtgtgaccacaggggaccgcagactcagctgatgacgacccccacgcggccaggcttcagcatctcagtgcccccaggccaggaaggcgtctctcttcccatttggtcagggtcattcactcagccagcagacacctctctgcccctgctgggtgctcagtgctgggagtccctgtccatgagccacccctggtccagagagaagtaaacagactcagcagagtgctgagccaagtgtgatgggaccacagagtggcagctgatcttaccgaatgggtagatgttttctgaacgagggcgaaggaattccctggcagagggaatagcctaggtgccaccctcctcttccaggctcccacgcagcctccgtttcccttccacacagtcctgccccacagagtagataactgtacatgcagagaagactccctagggcagaaagccagattgttgcatcacttctgccccctgcacagggcccggcacacagtgggggctccctgagtgctgggtaccccgtgagcagcacccgtggcccgtgctggacacagcctgttggggagactggtccttctcagcgtttgtgttcacgtaggggatggtcccccctctgtgtggctgccctgccacccccagtcagcctctgagcacagtggccggtgcccagctcatttagagctgaggcccccagaacccagggctgcagccgagtacacaggcctggccccgccagcgcaggacagcaactcttgggtaactgtgtccattggatttgtaaaaacagggccgtggtattatcacagaatctggtaggttctgcttccaagaaaaacagactgtcaagttaaatacatgtgggtagggacccaagcagagaggggtgtcagtaaagccagaagctcagctgaaatggtagggacccatgaaaagtcccatgcagggagaattgagccagaaggccccagagcatgggccgtgtgcccagttaggcctctccttcctgcatctgggttctcaggcgtgtagatcgtcacgtggagcccagtgagtgccagaggctgcacagggctctgggaatatcgggggagggaaaggcggcggctccacctacctgagctcgcgggctaactggaagacaggattcagcaggcaaagatcacacacccaggaggagggattggcctgggacgcagggagaccaggcacaacctgggggttgggaggacgggggtgtcagtacagcccacctgttggtcctttctgggacctcatgagaccaggccgggtgcctcctcacaagctggggcacgactggactcgccgaccggtgtgatgggcaggggggtgtgctgggcaccgtgcctgctacacaggggcaccgaagcagtgttccacccttggcaggatgaggggctgactcccaactgttgcatggtccccccaacccccaggcctgacataggcctcctaaggcagacctgactccctgactctgtgccagggcctgcggcggggggctgatcacctggagggcacaattccacttttcttctttcatgcctattaagattttctaatattcctctaatgatgtggagattaattgtataattttaaaagatcgttagaaatatgaaaaactagaaatgactcttgggcttttacctcccctgaaatggcaggaggcagacatgttgccctaaactgacccgggccaggttgggcaggaggggtgggcccagagaaccaggggcagacctggttcttccagggtcttcctcctggaagaccatgaagggcacagagtgggcagagaagggaggggtctctacacacatgcacgcgctctctctctctctctctctctctctctctctctctctctctctctctctctctctctctctccctccctccctccctccctccccccccccacctcctcccttccctcctaacctcacatcctcccagctgtgactcctccctggatgggattcgcagtgttctgagctgtcattagctcctggcatctggggtttccatttcatttccctctttacctaggtaactaaactgattgtactcctggctctggttcactaattcttgcaaatcctttaaaactatttatttatttgctggaactgtggctctcagaattcttgggaagtaatggcttttactggagcaggaggaggagactcgtgttctcccatctccttgtggctctctgctgcctgccccatgcccagttctctctgcgtctctttccactccttctctgagccggcccgtcacctgctgcaggtggctgactttcccaaagccgtagctgaccagatcttggaaagattaggtctccaggaagaacacaacaaagcgaggtttcatgagcacataggaatttaggctttgggtttgcatctgtggctgttgggctcctcatcccttatggaggaataccatttcctcgtccaggtgcctgtgacccttctatttccaaagcacaccgttcctgtgggtctgcagctttggaagcagaagccctgaggctgctcactcggccttttcccagccagcccctccctacaccccacaacagctgtccacccagctccctaggacccccagtggaggccagccagccggggcctccgaatggaaagagagtaggaggtggtctcatgagtagatgcagagccagccacttctggaacctagggctgcccactggctggggatggagggcagcgggctcccaggggagactgcgcccatgtaggacgccagggggactgtctctgtgacgggcctggctgcactgcctccattcctgccccaattcccagcctcattccccaacctccaatacatacctttctgcttcgctgacagagctgggtcctgtggttggcatcccaggccctgactgggacagacacatggatatgtcaggcctatgataaatgcgacttatggcagagcctgcccaggccctgggggagcatagctttgcaagttcatcacggccaccatggccatcactgtctttgcattccttcctggaactttgaagtccagggccagagcacccaaccggccaagtccaggcctcatggccacacaccagctaccagggagctacctcccctgggcccccacagtgacatggcccagatccccccatcttgggattgtccccagtaggaaggggttccagtgctgagcagccaaactcacctccgtccactccagtggctccttccccatcagacttgagctccttggggacagaaagtggtttcctcttcatggtccaggcctggcatgaaggaggcctgtaaatatgcaccgaggtgctgagctagtcgattcagagtgacatgcccccctcatatgtgtctggttctccactggagacagccagcagtcgctccacagccctgcacttcctggccccactcccggcccctcagccctggccacccacccctccttcctcataaggcctctagcaccacagctgaccatccctgcagctctctcatccagctcctcactgtgggcacctatgtccacactgagctgcgtgctcccctgggacaggagctgtcttgctcacctcttgcccccgcctctgcagctctcacctcaccccagctccaggtgtcggcccggtgtcctgtgccttgtgggcacctgatgatatgctttgggtgcttgcctacggcctgggaaattcagacgaggggtcagaaagggctggaatggcagggggcagcccagaagaagggagctcatgatggtgtgagaaagaaagccccaagccaggggagcatggggaggtgggcccgtgcgtgcagggtcaggccactcgcggctgctttccagcaaccttttcagtgtcagagacaaagctgatgctctcagcctccctcatgaaatccaccagtggcctccagcctgctaggggaaaaagatgatgggttggtttgcttgtttcactgtcagatacaggtttgccttgatctgcagcttttccctctgcttctcacatgccaggcctcatgctcacacacacatacacaagggcacagacacgcacccatgccacatgctgtctcacacacacatctacacagacacaggcacagacacacacccacaccacgtgctcacatgcactatacacaagaggacacactcccacaccacgtgctcacatgcactgtacacaagaggacacacatacacccatcctcacacttgcatacacacagacacatacacagggtgcatgcacacgtccacaccacgtgcttgcatgtacatacacatacaggcacgtacacacccccacaccacatgctgtctctctcacacatacacacatgggcacattcacagggatgcatacacgcccccacaccacatgcttccatacacatatgcatacatgagggcacatacacacgcccatgccacatgctcacacacatacatgggcacatacacaggggtgcatacacacccataccacctcctctcacacacacacatacacacacacccctacacagacacatacacaggggtgcatacacacacccatgccacatcctctctctcacacacacacacccctacacaggcacatacacaggggtgcatgcacacacccacacaacatgctctcacactcacatacacatacattagcacacaggggtgcatacacacgccctccatgtttgcacacaccatatgttcacacccacacccttgtacccaccacatgctcaaacacacacgtagatacacatgcatgcacacacactcacaaccatgtgtgcacacagcacatgccagccacaccagtgaccttcagtccctaacatggccctctcacacctcagcctgtgttcacatctcacccctgcagccagctggggcgctcctgctcaccttttgagtcttcccttgactccgtcaggaagaaccagccatcccctcctcggtgccacctctgcccagcacttgccccggtcagactcctctcacagggcattccaagtacacaaacgctctgtgagtgtgtctccctttaaactgtgagctccccagctctgcacacgtgccgatttccatgtgaccccaacacccgcccctccccccgccagtacctggcacacaggaaacagcagtttaatgaataaacaaaggggccaaacagacacaagccatctgaggttcccagaacttggggtctgagtctgcctctgaaggaggatgtcagggccccagcctcattcagcggtggacatggtcagctgctccagggcaccctcgaacccctatagagctcccctggcattctgccctgaccccagggcactcagagctctccaaggtgctgaacttgtctcttgcctctggccccaactatctatcctggcttcttcaatccctccagccaagaaccaccccatcttccaagagcctacctccagtggaaaagcagcagcacctctgaataaataacactgtagacaaaacacagttcttccacatgaagacatggagggctatgagcacaggaggaggagtgagacccacccaccctcacccccaccccagacattggattcagttcagtttctggggccagactcgagtctctcttctggccctgaggaccaaggcacctcaggacaccccactccctggtaacaagttctaacccctggtggggccaactacctcataaaaggacggtagggccaccctgcccctaaatgcctccccctctgtctgctcccatctgccttggccctcacctggccctcccccagcccaccttcaggcttccagtccccacagagctcttccaggtcctgccttgactcccctggatgtttaattccccacacaaagtcctctccacctctggctctggccactccagagctcttcacaccactggccttgaccctgtttctcacccaagtctcccaagccctggccttctcccaaggtctctcggccctgcccgcaccccatgacatgttcttcctctcccgctcggaatattcccatcacccctcggcctccatcctccaagcaggggaaggagccaagtagcaacctttttgctggaggcaggagggactacgtgctgctagtgtcaaccaaaccaggcacttactccagctgcagccatggaatttgcccatggccttccctgctcagcccaggacccacccccacctctgcaatgcccaccctctggccaggttccttgggctgggatggggtcctgacactctgccccctgtcctcctccgttccttcctaaacaagagactgtaccccttgactcctactctgagcccacaaggcatgaactgtccatgaaaatgatctgttcttggtttttgtttgggtagatcttatgatccgggcagctgggacccaaagcttggagagaaccctgttctgcagagcgacctcaagggctccaggctgcacctgtgtttggtggctgctggggtggtcacttcttcccaggaaggccatttaaggctcttcaaagccattggagctgaacagaataattaaatctctccccaaggaggacctaaataattaatgtgccaatgctttagcaactgtagattgcatacgaagcgcagggttatcgccgttattagcaccagtgttgcctgaagttagaggggcttgacttttacattctgtccatccgattccacacaactgtggtatttcaaatagttccagtggatcacatttgggggaatgtgatctaaccccctagcacgcatctgcatgtggtctgtaacccacaatgaattccaatcagaagggaactttttgtgcaaaacatggcgccaggtgctcaggaggccagagagaaaagccctccagaagatcacaaattagaaaggagacagacagacagacattcctctgtaataaggcagccaagggtctctactccaatagaggtaccaagtctcatgggaccacaggagagagtgaagttaatggcaactgagggaatctgtaagaatttttggaggatgggttttttgttttttttttttttgagacagagtctgctctgtcgcctgggctggagtgcagtggcgcgatctcagctcactgcaagctccgcttcccgggttcacaccattctcctgcctccgcctcctgagtagctgggactacaggcgtctgctaccatgcccggctaattttttctatttttagtaaagacggggtttcaccgtgttagccaggatggtcttgatctcctgacctcgtgatctgcccgcctcagcctcccaaagtgctgggattacaggagtgagccaccgcacctggccgaggatgggattttaagtgaggcttacagccagccatggtggctcacacctgtaatcccaatgctttgagaagccaagccaggagaatcacttgaggtcaggagtttgagatcagcctgagcaacatggcgagaccctgtctctacaaaataataacaataatagggtgaggcttaaggaatggatgggaccctaggaagcaagtgtaggagaaaccctggccaaaggcagaaagagaaacattcaaagtgaaggaacaggatgaactgcctgtgaacttagagagttgggggatgcgtggaacatgatagaatatgaagctgtgagcacaggtcaggtcaggtcatagaagcctgcaggagcccatggtaaggagtttggaaataagggatcaaggcagcccttggtctggtggaccctaggtgaagaaagagcccccactcaaggtcacaggaagattgaggtgaatctgtgactagatctaggtctcccagtcgcactacccacggcccaagctggcagccacctctgttcaatccttggacctaagggacaggggcacaaacccagggaaagagaagggaatatttctgttaattttatgatgatttcaaaaaatgttaaggagaaaaatagaagcaaattttctatcatcttagagggcatgagaatgttccagctggaaggcagtcttcagtcccacccgcacccactggtgtgcagccctgggtcaggggctgtaggcacggaggggacctctgaggccagatatcactgctcagtaaataggccttgtcatccagtgtcatcagtttggaaacagcaggctagtgggtgaggttgtaactgttcctaggactttggctcccttttagataaatggcagaaattcccatttggaccacaggaaagccagaagggctcttcactaaaaccctaagtccaggcaagaagtcagagtgtttcatggttcctaggagggtttgcctgcatagggcctcaggtgtcacacgtccgactcaggctggacgagcgacccacaggtgccgcccgcaggtggtttcattctgtctcacctggaagctggagcccgctcttggccttcagggtttattctgaggccaactcttctttggaaaagaagtaggggaagaaatgcatatctgatcagaccggggagggagggcaacattccgcttgggaggcgcgtggagcagcagcgggacgttctgtttgtgtaaagcccccatttgtccccacagtgtcagcatgcgtcgcgctccctgctcctggatgaattaccctctgggcctgcctgacactgtctttgctgggctttctcagtatatttcacaactgctctgagtttataattttttcaggtcctttatcaaatatgtgtcatacataccaatgggatgggaagcatttatcacctagctgggttcttacttgagctctgaaaaaaatgatttggccacacaacctttctcaaggctctgatttaatggacttctctgctgcaaagccactgaaattctttgccttttaatatttgacatctcttcctctttattaccatctcatacagcccttataggccagccagaacgagcccattagtctctgacaaataacttgtgtcgtttggtgaaaaatatgcagaagtttggctgcaacttcatctccagccttggttctgtttgtggcttcactctcctctaggcaaagcatccagccccaggcagagcctcttccagtccccattccctcgtgccacttgccgctgcatccacagagccattttacactcaccacttagaaccaatggggtttgagacgggtcgttagaggggatatctggtccataactcgggggtgagaactgaatgggagctatggcctcaagaagctttgctcactttcactcactctccggggacccctggcaccactatcataggaatgagcctgggctagcctgttggagcatgagagaccacgtggagcagaaatgagttgtcccagatgagacatttagaccggccagtctctgccaatatcagccaggcctgacctagatctgctgagtgtagcccaaactgccaaaccagagtcacagtctaaataagtgctcatagcagcattgtttacaatagcaaaatggtggcagcaacccaagcgtccatcaaaggatgaatggttaaacagtatgtggtatctacatacagtggaatattagccagccttaaaaaggagggaaatcctgatgcatgctaccatgtgggtgaaccttaaggacattatgctaggtgaaataaagccattcacaggacaaatattgcataattccacttataagagggtctaaaatagtcaaactcatagagacagaaagtagaatggtggttgccggggatgagtggaggggaggtggggagtggttgtttaatgggtgtggagtttccgtttgtgaagatgaaaaggattccagaggattgcccaacagtgtgaatatacttaacacaactgaactggacactttaaaatgggtacattttaccacaactaaaaaaaaaaaaaaagaattagcctcaaactgaactagcaaaggtgaaaccaacacagggaaagttccctgagcacttgagtccatcatctattcatgccttgtgtatcagttagctcttgctgcttaacaaacaattctaaaattcagtgacttaaaattgagtgttttaaaaacagccacttatttagattgtgatcctggtttagcagtttggactacactcagccaatctaggtcaggcctggctgatattggcagagactggctggtctaaatgcctcatctgggacagctcgtttctgctccacacagtctctcatgctccaacaggctagcccaggcttgttcctatggtggtggtgccaggggtccctggagagtgagtgaaagtgagcaaagcttcttaaggccgtgactcacattttcacagggtcacttccaccacattctgtagtccaaagcaaatcacaaagccagccaagattcaaagggtagggaaatcatctccacctcttgacgggggaagctacaaagaatatttgccatccatcacaccagatatatatatatgtatgccaggccctgtgctgagtgtcgaagataaaaatatgaataaaacatagtctagtgcaggaggcagacatgtaaataaataattacaactcctagtatcgataaagaagtgagcacaagttgttctgccagcctccggaggagggcagagggcagagggtgtgggaggaagaggggaaggaggcaaagaggcccaggacaaaataacactttccctggtggtgaaggataaatactgcttggccagatggaggaaggggagggaagatccaggcggaggggacggagacttggagtggggacgtgtgtggggtgcaaggaggcttcgctggggagcaaagggtcccctgggagtggaggaggagcggagggaacggggagacctcccagagggctgtgctgccccttcagccccgaaggatttgtgtggccagtggctgtgaggatgcagtgtggaggtggcctggagggggacaggctggaaacagggagacatcctcagaggctgttgcagtgactcaagtgaaagatgagggcagctcactcagggtgctggagggcctagggcaggagaggctggatcctgagaattctaggaggtaaaaagatgggacttggtgtgatgagggaggggaggagtctggggaaggcctgcggattgcgggcagtggaccgtcttccacgggaagaggagctccatgctgggcgctgagtcgagcatcctgggcatgcaggaggaagtggggaaaggggcaaagaggcctgggacaaaaatctgagcatggggaagccacttccgtgagcaaggccagggtgtgcagtcccacagacgtaggcgggcatcccgctcaaagccgaggagacccaaaaacaacctctggggccgaccaacagggacagatgctgaggccaagtcttcatcccacctggtaggctcagctgccaggactccactcgccagaccccaccgagcctccatgcagggagggtcatgggctctctaggccatcttctcctggggtctctaggccatcttctcctgggctctctaggccatcttcccctggggtctctaggccatcttcccctggggtctctaggccatcttcccctggggtctctaggccatcttctcctggggtctctaggccatcttctcctggggtctctaggccatcttctcctggggtctctaggccatcatcttctcccgcagaatcctggagcaggatagtgcagggtgccaggtgcttctggaagtccactctgaagacccagccccgaggcctgcaaatctcccacacctgagaataggccatgttgttggaagatctccccagaccccgcagcaatcccacacacctcacttggaagcttctcagagatcagggagtgtcctttgccaaaacatggggcagggaggagggcagcctgtgcccagcgggtcctggtgtccccttgtggattctgggtctccccaccgacaggcacagcctgagagcctaagctcctgcttcgccggccgggcaggcagtgggcagcagcccgcacacaccagccaatcgatactaggaatgcacttggggcctgctgggaatcccctggtgagcactttcataaattgaaaaattcttctgaaagtgaataatcttccccaactattaaatccagatttccaccaagtgagattcagagagagcagaaagcacctacattaggatggggacacctgaacctccaagcgccttccaggtctagctccagaattcctggagcagaaggtgtcacggccggggctggggctttagatagaatcattgccgggacctcgatttgaaaggaaggtcttcagaaaccctcaggatgcctcgggcccagaaagagtaggcatttgtgtgctgttgtgttttccaggcccctaagcactgattaactcagcaggcatgtggggccacatctgtcactctctgcagcatgacacccagggggctaccaagcaggtgtctctgcccttctgtgctagaggaaacagaggcccagaaagctggggtgctggcccagggtcacacaccaattagtggcagtgctggaacaagaaccaggatccaggtcttcagaatcccagcccagaattctgtcccctcccctaccgcttcactcaaaaaggggatgtcatctacctggctcgtggtttgggcattaattcggctggtgactctttctggagatacgtgtgagcatggcagctgagccttatccagcctggccctgcaactggccctgtgctgtctcccctccgcctgggctgtgcgcaggcgccgctgggctctctaccttgtctctagcccaggcctctatccaccgcctcctaccccatcccccaggtgtcccacaggccccaccccacaactgatcttcttgttccctcccttcctgatgtcccaccaccatcccctccaaaaacctgttagtggtctccatgcctccccctccccacttccttcctgcactgagccccacggggtccacacgctcctgtttctctgtcctgctgttgctgtgtaattccggccttctcacctctccctcggaaagaccgtcaccatcagcagcactgcacactcccacccgctgagcgctccctgtgtgcccgccacatgctgtctcatggaaccttcaacaagtgtggaccctgaggctctgaggatgtgggtcccctttcccaaggtcacagagctgataggaggcccagtgcaggttcaccctcaggtctggcttcgaggctcaactctctgcacggcgctatcttgcctcccattggcctcccaagccactccccatcctgcctctgtgtggatttgtctgaaacccaagtctaaccttgccacttcctgtccagaatcccctgtggctccctggtgccccaggatgaagctggagctcccaggcaagactgttgcgatctggccccgcccaccgcctcattgtgttccctgttgcccatggcccttttgtccacctgcacctgccccctcgtgctcctgcaccctcccacaccctcccgcaccctcccgcgccctcccactggtgctctgagcctgttggtctctgtctgtagctcccaccccccttgctccgggtctgagctcaccccacgtagatccttcctgaagtcccagccagagcccccttccgcacccctggagatgctctgctgtgactccagactcagtgtgacttggggttggcggggtcagtgattcggccttgccatggctcccagagggcagggcccccaaccccgatccctgaacatgcatgtggcgtgttctccaggagcccctcccaccgtcttccttggtcttcagcagagcccagtgtgtcctcaccaaaaagggcctgcctggcaatcagggagcagaagcaggatcctcaatccccattttacagatgcagaagcagaggctcagagagacaaagggtcttggccaagtgtcagaagcagggctggggccaggaaggagtcctggcgggcagccggccctggcccatgtggacagcaacaaccaatgaggctggagcaggggcgatggccggtggggctggagagcagggctcagctctgcaggccaccctctcccacacacctgccaagggaaatcgcctggcctgaagacagtctaggtcattctggcccaaggatcagggcctctgacgcgcagctgccagcaacattaagggcaggctttgcccaggggatcctgggggcaggcagatgaggcaaggctgttgtggggagcagtggtcaactgaaggccctaacttttgccaatgaaagagagtgtgcaaccccaacagggtgactggcaggctcttccctccttctcctttctaagccttggggtgggtctgggagaagcttctgacatccccaggtctggagcccatgggcccgggcactgtctgtgccagccccaggtccaagacaccgggcacaggtaggtgtgcagcagagtgggagcctccgaggccacttcctgggatctgccgggctgtaaagcaggctctgccccatgtcaaagccccaggagagggtgggtgtcctgagagactcaactgggacatgggaggaggcgcagagggtccctgtcccttgcttgcttgctttcccgaaaagtccccacaagtgtgaaacagaaggaggtgcttgccaggcctcccatggccccctcctttctcggggtctcctcccacgccatggctgtgagtgtctaacataagggacgctgtttttgcaggttttgtggttgtgattcctttgaaccatatccagcccatcttacatcacagtgccatgcttgacttggtctccaatacatcggcacccattggcatttggagaacttgctccgtagttatttgacagtttttagttgtctgtgataatgtattctctatgtttccaatcgtcagtatgggaatctctcccccaacctttcaatttctgggtttgattttttgtatcatatttggtttttttgctttttaaagttgtgattcctttggttattagcccctcccagtggctgcttgtttatgcattatgtttgtgacttcttttgactgtcagtgttgagccagtcttgccaagaaacaatatcaagtatttcctatttctctacttcttgaaaaaagaaaaaaaactttttttaattaaaaaaaaaaaaactcttaatgggaacctggccctgtctgtcttctctgttctgcagaaatgttgaaggaattgaaccagcaacgcagagcgaaagcgtttacagacctgaaaattgttgttgaaggcagagagtttgaagtccaccaaaatgttctagcttcctgcagcttgtatttcaaggacctgattcaaaggtttgccttccttccagctgtggtcgggtctgttcctttgtaggacgcttttgtgtcgcttttctcttcccctctcttgcaggttcctgaagcgtgactccctgtcacagagccagtagccatctctcctcctcctcctcctcctcctccccagtaccctctcacacacagcctcagagcagccactgcgcccagcacccgcccccacccacagctttgctgtcaccagctttgctggtcaccaggggcctctgccagcagtagacaacaccgtgccccacccctgagatcccaggttctcagtggctcacaagctgtccctgagattaggggggactgtaggctccattttaagggatcactacacactgcccccaccgggccagagcaggatccccagtgccatcgtccctgctgtcggtggtgactaatgccaggaaagcgcatcggccaggctgtccctgctgaggagcacaaggtgcccccggggctgcttttccccagcccaagtaggggagaagagacttgtagcaatgcctgggccacactgcatgtctgatccttgtgcagtgagcctaaaccggcgctgtggagcatagaccaggtgtgtcctaaacacggtctctctcaacccttgctccctccctcctgccctctgccctggctatttctacctgaatgagtcttattggtgcatgagcatctttttttttttcctccattatgttgattttttaatttgtctgcttcatacctttgcaaagaagtcaggggccaccttccagctccgtagtaagggagagcagccaaggggccagcccagggtaacgctcacgtttctctcagccctcagcagattaacgccgctgctcctcttgccttgcagcctctccggggcagacgctgagccgggactgtgctcagagggaggacaggacctctgcttcccaatgccgtgtttggacttgccaactaaccccggagtgactgtgttttgtttcaggatggatccctggctggcatctcctctccgatccggcctttcacatagagcccagctgccctgtgggcaggctctggctggccacatgccggccctcagcctcgcaggaaggggcaggctctttgggacttcccatctcatggacacctcaggtctcctgcccccggtgcttgggctctctctgtccaagcacaggggttaggggcatgtggtctggggtgaagggacatgtctagtggcctcaccaggccagggaggactctgtgctgccactcttgacaaatcctggacagcaggggcccgcatcgggctgccggatcatggatgagcgtcctagggtcttgggcctggctccaaaccagctagagaggacagaaagggggcaggtcagtgctgagcggcagcctagtccccagctagaacgtggtgggtgagaggagcacagggccctcggatggctttcagagaccgcacattgaaagccagacttgcacacaacagagaagaacacgtgctaggagggaacccaaagtagtgaaggcttcttgggctgagaagagggaggaagagcattccaggccggggatggggcatgagtggggaagggcagggtggggcagatggccctccagagggggctgcactggggcaggcaagccctgaccccatgctaggacctgggcatggtctgaggtgggtaacttcaagagcagtggggaggggacgcccacctgaaggaaggagaacagtaggatgtgtctcggtggccctcatcagaaaggatggggctggaggagagaggacatccccaccttggcaggtaggagacctgggtcctacgcctgactccgccgcttgtcttgtgacctcagactggtcacgtcctctcctgcgccctgggctttctcatctataaatcaggaaattggttcaagtgatgcccaggtctccttgcagctctgacacctccgggggatgggcagaggatgggcaggaccaggacggaaaggcaagcaccaggacccaaggaggtgaggtgtcacgggcatcagaggtcacgggcatcagaggtcacagggaggagagcaggtccacaggccagtgtcgggagagctggggagatgagcagttgaccatctggtgtgtcaagctgagcagcctgacggacgcccaggtccccaggttgggccacctgtaggcagccaggtgcatggaactgaacccagagaggtctgaggtttgtagagatggggctggggggccttcagcatacagtaaggtcacacaggaaaaaggaggggaagccaaagccaagcccagggtgccctgtggctgaaagtcgccgtgttcgtttgcagccacagagcacacatgaccaagaagtgccttcttgggaggaaagccaagtctttacaagaagatggcttcctttcctgccgtgtaaaatcatagagaatttcacattcttggtggtcaagagagaagctgatgtaaccatgtcttttcagtccccttggcatccgtgaccctggagacttactgtgcagtggccggattggcccagtgcagagccatggccctgccctttgaccccaagcagtggctccacgctcaggcagctgcactcttgtaaggggagggagtagggaccttctctgggacctctgtcctggtgtagacctccgtggggatcaacattggccctccctgggtgagccctgccaggggcaggtgatccctccctgctgtccccgcatccccaggtctggaggctcagactagactcccaccaccagcctgggacaggtgatgtgtccaccactccagccccagggaggacaatgacccagcacccaagcctggcaaggacggtgcctgccagacccaaccccagtgcagacgccctgccccacagccacaggacagaatgggaattcaagtcactcactggctcgtcactcagcaaacacacaggagcccctcctggggccggggctcacaccaaacaccagctgagcccacagtctggtggggacacgctgcagacaggcaaggagacgagcagagacgatgcttcagagacttgtggtccaagggcctggctgtgggggagggtcattcagagaggctccttggagaggtggcatctgatgtgggttatgaagaatgggcattgtccgggcagacaagtggggaagagcaaggtcgaaaggcgggagggggtctcaggtcccacaggtgactccacgttgctgcagggccgggtatgagggtggcttgcaggggacgcggctggagggaggctagacctgggtcacaggagcctgggggcgttgcgaccagatgtgtgttttgtaaagatgacagtcagaccatgagcgggagagctgggtctcagtgtcctctcccagcctgcggccgagtccctttgggcttggctgccccccatggccatgcagaagggtcccggcaaagtcctgcccagagccccacacccttcaccctcttccctgagcatgtgtgggtggcagcacctcggtagagtggacaggtgtggcttggaagccagataacgagactcccatgtctcatcttggatgctggcacaatggcgtcacccacacctgtcaccaagttaccaagggtgggcctgagccacacaaatccccaagacccagggagactgggtgcatgcccatgcgtgtgtcctgcagctgatgacacgcccaggcgttcattcatgggcggagtcctctcttctgagcagagctgggtaccagccacctgccccatgcctgtccctcacccaccactgcccatggattcctctcattgctccagacagtgcccagttccaacttgcaaaatgaaaacatctgatctctgaggtgcatgagggtggatgagggcctccatcctgatgtctggaaggaagggcatttctaatcctggatgagtctgtggctaatggtgggattgcaaacattctagtagttgggcctagccattcctctgctgagcagaggctgcgtcccggactctggcctctcctgggcacccccacgcccagaagtaggtgactccaggaagctctggtcttctgacagaccccatggggcctgtgtggctggggagcaccagcctgccctcactctataccccacccccctgcgtcagcttcatagagagggttagtgctgcccgtctgccctgctgcagtccctccaaagccacatcatgacctgatgggccagcagcaccccaagccattcactccatggggcccggtaggacaggacaagaaatggcttggggcagggacagaacagccacctgtggaggacgcagccctcgtcagcgaccagggtcacccatcacgggggtgtcccctctggggtccctgttcagagagaagaggcctaaggagcactggggtccagtcccaagacagtctgatgtccagggatacagaggcgcccccaccccctcacagctctgcaggccatgcacgaaggcctgtgtggatgagaaccgtgtgtgttggtaagaggcacagccctcgccctctggggcctcgcctcctctttgaactcagattctgaaagagcccccatcacattcccctgtgcctctgcggcctttccctgcagatcatctgcccagcggccccctccaccccacaggtgaccctcacaaggggccaggaggaacagagccacagccatgcctcctgtggccaggggtcctcctcagtctagacagcacctgcgatgctccacggcacctgtgtccctcctcctgtgcctggtggccaggacccactccctggctcagactgtgggcaagacaggcagcacccctcagggcagccatgtgagtcccatcgcacctgtcactcagccatggactgtccgtctgcccagcacccctccccaccgggggacttcacggctcttagggtcagtgcatatgtgtgcgtgtgcatgtgctcgcacatcctgaagtccccctgggctcagcccttcactggctttgagctcctctgcctgaggactcctgggtggacaagtgggctggccagaggtgaaggcagcagtgactgggggcctcgggagaaggctgtggcccagtgtgacctccacagggcagaaagggcatgcagaggagaggctggacagcggcttgtaggaatgaagtcccaggcagcaaagacaggagtacgaggttgaccagatggctctggggccgggggtgttgaggatttctgtgattttaagtgatcacgtagtgaattatttttacgcttaacaaagccaccgaggtatggaaatccatcctgacagcagaagactaggtgtgtgaattcactttagaagtcactctgtgttggggggtttggaggggcctctgtggagtccacaccttgccccctctgccttctgggctggccccgggcttggaggcagaggccccttggggtcctggtgggatgagccgttgtgtggggagggcctactgtggccacgctgggagagaggctggacgccagctccgcagcaggattgcacctccccctctcctcctggccatgcctgtgctgaggccctgggagggcggtgcctgacctcagagaatgtcgctctaatggtggaatttcaggtactgccacgtagggaagagtctcgtgggaagggcattttccagcctctgtcacaaaatctccaagggaattcagacctcatctagttccatcctcttattttgcagaagaggaggctgagggcccgggagaccaaggctgcccacctgtgggtggcagagcccaggcacccagtgcccccagctccctgccccctgctctttccgcccacccacacacccagcagctggcctctctgcggccagcctgctcgcttgctggacacctcgacagccccaccgccagccgcaggtgcgcgcaagggacccgtcacaagcatcttgccctgtggcctcctgagaagcgagtgagtggaccacagaggtcatttcccagccacgtggccaggcccagcccgaggcaggaccgggctcagggtgggaagcagggctactcagaggagccaggatggggcggccaagccgacggcctgcggggccgcctccggactcctaacgcggcaggtgtttttactcctgctgtcacttatgtatcagtgtcactcttgcttcatcttatctgtttccttccaggtccagctttaggggcagctgccaggccttaggagcctttgcaatggttttgtattcctgtagacaccagatataaacagatttatatatttgtgtccctcccctgctccccccagttccccagcccgacgcacactctacacgcaggccactctgacctctgaccccgtgttccatgtggcaggagggcccgccccgggccaggccccaggtcatggctgctggctgtctgtggcggaagtccttggttgtttcctctcccctcctcccggctctcaccattctgtccgtctatctcgtcttgtcctcagtttcaaagcaatgtcacgaagggcttccttttcatgcctaaaaggaaacaatatgtttttggaaagaggtggggttggagcgggttctggggcaacttggggccctcggtcctggggcgatcagaggatatctctggattggctggcatcacagccagttgggagcctcccaagcctgggtcacgttggagaatctgccacccaaggcaggcagggccgggctgggatgcgtcggcctgctttggtggagacaccagggcctgcagtgggctgaaccgtattgtttccctttgaggccagtcctggtcctcgtccccatccatagctcatgctttttgatttgcatctttttttgcatggacatgccgagtagtgataagcagggttttctgttcttttgggcgtctctggtcagactcttctctttcagatcccgtgtcacagcattaggttcaggtgtgtcattgccgtgtcctttgagccctaaaaccaagggcatgaccaaggtgtgcagggagatctagccctgtgaggaagcggcacggtggccgcagggcaggaggtaaggacaccctggtctctgtgcctaggtccgtgcaagacagcggccagggcggccgggagaagctggagctcgtcctgtcgaacctgcaggcagacgtcctggagttgctgctggagtttgtctacacgggctccctggtcatcgactcggccaacgccaagacactgctggaggcggccagcaagttccagttccacaccttctgcaaagtctgcgtgtcctttctcggtgagcccgggggccacatatgtcgcttggggggaagagtgcagatgggcggagaactccataaacagcaaggactgagcggggaggtctgtgtgtgcacacctgaagctccctcacatgtggctgagtttggcagggctgttttaagatggtaattcagataactacatgcaaaggctctctttccctggcatggaatgaagaggactccgtgtcatttctctgtaggtgggagaggcatactgtgccccgccaggccttgtgggaacaaatggcaccatgagggctgtgcatgtgctctgtttgtggggaaaggctatggccctggcctcacagtcctgttctctagaccctgaacaaagcagcccaaacttgccttccctttaccttattcatacctgggctgcctcagatgtctgtccaggtctagacatctgaactgtcccttgagtacccagatctgctgcccaggatggggactgagtgtcaggagctcccgggggggtcgctgacccgaacaacatgctgcctttacgcttgatgctaccccgcatgggcgacggcaaggtgagggagggacaaagacgaaagcccccaaagaagcagtggcctggggtgtggagtgcagagagaaagccagagcccagcctagagatggggcagatccgtgaggacagaggggcaccaagcagtctcgaggtgccaggaaccacgatggcagtgaggctcgcgcacagatgggcctccagaaacccagacacgcctaggttggaagaaccactagcatgaaggggaaagagtgcaaggccctgggagggacagtattgggtaaacaggatacggagatggctcccaccccagacctagccactaagcccaggagagctggccagatggaccccagagcctagcgagccagattgagtggggcagaagcctatgcaagaagctgggaggtgtgtgaggggcactactgctaacgaaggagtctgggaccacagacatgcctggcacaacatggaagatgctgtaagcctcagtgccaccctcaacctcagcgacagtgtgactcctgacgcctgaccccagcccaggcccaggctctgagcagggctctcctgctccatgcctcccagtctcggtccttctgccaggacctgtgcgcacagagggaggcccctgggagtcagcatgaaatggggtaggggagaacccaggagaaggatcgaagcctccagacacccaggaagggggcctgcagggactctggacactgcagtcagggtcccccgggatgtgggttcagagaaggatctagggtgacagcaatgggaacaggtggcaactgcttcccgggcctttgggtcagtggtcctgcgctgtcgcccccagagaagcagctgacggccagcaactgcctgggcgtgctggccatggccgaggccatgcagtgcagcgagctctaccacatggccaaggccttcgcgctgcagatcttccccgaggtggccgcccaggaggagatcctcagcatctccaaggacgacttcatcgcctacgtctccaacgacagcctcaacaccaaggctgaggagctggtgtacgagacagtcatcaagtggatcaagaaggaccccgcgacacgcacacaggtggggcctgccctgtcccccgccccttctctctgggtttggggtccccctgcggcaatggggtctgcagcaaggaggaaggaagtgaaccttccttgtcctgctctccctaagtggcagagaggtgaagggcgggcagagaggtgagaaaccagtcaccaaaggatcctcaagggctggcattccaccccaaaggagacccaagtcggccaagagccgcagcacctgcactctgcagggagaagtgggtccctgagccagggggctctggggctcccaggaacacggacccagctggaggagcccatacctgctctgattgttgaggggatggacagcccgcaatggaccaaatggaaacccctgcatgcaggaagagggagagtgaggtcctgaggggactgtgttgggtaaacagaggatacagagagggctcccgccccagatctcgccattgagccccagagaaaggggtcctcagatcaggtgggaggcagggtttcttttcagaggtaggaagttagatggggcagctaataacagtgacagccacaagtccctatgactcccagatctgtgtctcaggctgaaaccctttcctgagctccagacccctctgctcagtggccttctgggcctctccagcagaatgtcctgcagatccgtctaattcaccaagccgaaagcctacacctcttcctgttccttatttcagcgatgcctggtccccagaactgaagcttagcttcctcccacttctcccatagccatttcgctacacgcgctcattcctgcctccttcctcccctttaagtggatcgacttccctctccccatcgagaccttcctcctctcgccaggattactgcagcacctcctaagtggtttccttgcctctgtcttgctccctccaaatccattttccaccctccagcctgagcggtctctctaaaagcacactgaacatctcatccatccactcaaacccctcctcagttgcctcgtcgactccacaggggaaactgtgcagtccttgttgagcatgagcatgagctggcctccccagcctctctcctctcacttctccctgtctccctaaacgcctcctcaacaaaatcctgttacatctcgtaagaataaaccccagacaattctccagacacaccattctctttcactctctgacgcctctacacgggcttcgaatgtccaccctcccatccaccttgtgcctggcagaagtctgcccattttgtataccccatccagatgccattccctctgcaaaacctcttactcctgcacccactacaaaccctcactagacactcctcttgcccctcgtgaatttttcatagcagatcccctcccattaaactgtgtaccccttgaggtctgaaactgggtcacagtggtctctgcacccccagtgatgagcgtcatgcctggcctatggtggtctcgttactcatgggatgaaacgaaagtagagtgatgagcagagtttgttaggaggggagattcaagggagcctgtaaaaccacctcagtgcagggtgacagtttgaggccgtgggacatgggacaccactgaaagttttcggtgctggagagacacaggctcccacggctgagacttacaagctcaatagtcgccatctccttgaagctttcctgggtcctcccacctgttcctgagtccttgtcacactcacagctctttaataatcgcgtcttcctcattttaacccctcgcccctgcccccagtggcctgatctgcagcaggggtccacagccccaggtggagtgagagaatggggtgctggggggatgaacacatgctcccactcctgcagggctggctgcagcctgccagcctcccctccgcacccctgcgctcccggccctcccctccacacctccagctgactagacttcccttcacctctgtctaggctagcagagtatctacactcccaagcctaacacagcctggaattatccattcttgtgcagccccacaccatttctttccgtccgggaggtggctctctcttgctagtctaagaagattctgtctcctgtaccctgcagtacgcggctgagctcctggccgtggtccgcctccccttcatccaccccagctacctgctcaatgtggttgacaatgaagagctgatcaagtcatcagaagcctgccgggacctggtgaacgaggccaaacgctaccatatgctgccccacgcccgccaggagatgcagacgccccgaacccggccgcgcctctctgcaggtatgaaggggcacgccccgaacctcccaagaagcagtgtcttgggctcagtggttccagtgaggtgccaggcacagatgccgacagtcttagagtgtgtcccaagggcgcccatccatgtccctgcaggtgtggctgaggtcatcgtcttggttgggggccgtcagatggtggggatgacccagcgctcgctggtggccgtcacctgctggaacccgcagaacaacaagtggtaccccttggcctcgctgcccttctatgaccgcgagttcttcagtgtagtgagtgcaggggacaacatctacctctcaggtgaggccccccggggttggggcgggaccaggcatgggggtcccaaggggactgctccccacgtcagggctgaggaaggccatggcccagaagtgtctactttgcaggtgaagccttcctctgcccctggggctgggcctgctgaccccaggcccctcctcaccccgcccgctctctctgcctcccacactgcctccaggtgggatggaatcaggggtgacgctggctgatgtctggtgctacatgtccctgcttgataactggaacctcgtctccagaatgacagtcccccgctgtcggcacaatagcctcgtctacgatgggaagatttacaccctcgggggacttggcgtggcaggcaacgtggaccacgtggagaggtaatgaggccacggtcaggacaggggcatgctctttgctcaccaagaactgaaatcacgtcactcactgtacctcccaacacccactcagtggcgatggagcagagcctggaccattcatatgggcagtcatcccaggctcttcagtcacagcaccgggggcagcagggtgtgggatacaagcagatgggatgacatctgtgtcacctttgcagtcgctgagatgggagatggggcgcttctgtcccgacaacccatttaggtgtcagacaagctggaggcccaagatccagttgcagaaggcctgggatgagccagaccctcctggccaggcagtcagggaacaccctgcaccatgagcaccagcccagagactgctggggtttcgggcaaagctggaagcaatgtttaaaatgcaggtcatgccagtggcggtgcctccttgtcctgccaagcggggggtcccacaccagggagctcccttcctccctccagccacacacaccaggacatctgttcgtaatacagagaaaggccactgcatacaaactaagcaatttagggagaacattcttgccaaccctctagaactttccagaagaaaaaataagccaaaggaccacgtgtgaacctgccctccgctgggagtcccagcctggcttcctcccaaggccattgtggagggtcagatacaggcatgaggggcgtgggctgaagtgggtgcttccggatgagaatacaaaatccttttcccttgagccagggagactgttctttcttacagagaacagatgcctgggggaaaagctcaggaagctttgtcaggcagcagaacggaggcttagtcctgcttttggagaaactagtgcctggagggtaacccgtcaggctgacctggcccaaagcacaacccaggggagacagctaagattgccagagcccctcctgcacctgagcccaccacccccaccgccatgtgtcaccagaaagcacatcttcccgtgggacatcatgttgcctatgaagccacacatacccctcaatttgtatttttcccccttggtggctaattggacacttgacaaatgttacagcaaagacggttgcagagtgaggcaggctctgaatgctcattgtgggcttttaactcctcccccaagtagagcccagagatggctcagtaacaacatttagttatcatattgatctggcaatcatgggcattgccacgtgaaaatgaggatattaccgcagttgctggagctgggttggccccggtgctggcagccttcagtgtgacccactgcccagctatgcataccccaagcattctggaagcatcggcttccgatcatttgtcatccaataataaacaaacacatgaaaaatgagacattttctctgtaggagtaaactgaactggatccgtcattctgtcttgcttttgtcggctatttttaatctcctaagacactgattactcattttgcaaacttatactgttgataaatatagggatttgttcaaggatcaaatgcaccaactaagcagtgagacaagctctactcttccagggtcctggagcagttctccaagaccaggggttgcctgtatgggccttccctggggggcaaggccctccttctggctgtgaaagttcagcatgggcacagtgtgagcgagaccaccccgggaaccccaagagatgaaggacaaaagggtgccctgaagggccctgagcccttcctcagcccaccagagtctgccaactgtccttgcaggggcaggatgcaggcttgaagacccctgggcagtgtgcatgcaagtgggttggagggtgcaggggaaggaacgctcactgctttccaagaagtgtagctagacccccttcgggtaggttgctttctgtggcacacagtggcaatgatgagaattcagggtgacaggaaggtcagggtaatggggacagacacgagggggctttgttccccaggaagcactaatggtacaaatggctattatattgataatgaatgagatatatggtgcattataattatattacattatggtattacaggaatagagcaagattatataattatagattaagacaacagcacaatagacaaacctgtattatatcattatataaataaccgggtctaatattttatagcaatatattgcagtcactgtggttactggataaatgatagcagaacgcctcactcggcagggtcatttgcatgtcattagcatatccttctcaagcaggaagctgacagattgagctgacgggagggctcatggcttggcaatcagccacctggaataacaagctctcaggaaattcgcatttggtgcgatgtgccatcatactgaaagactgaggactaacagccacataatcttccactgtctcccagctccttctgcaggagctctttggaaccctgccatattggcttaaaaagcagatatctgaacttctgacactgtccaaaaagacacttactccattgcatataagctacatatcatttgtctggggcttaattgaatctgccccgctgctgccctttgagacattccagcctcgtctcaaatccaagcacacaactggacgtcacatcaccctcgctcagaggcagaggcacgggctctgggaggccagcttcctgggctctgggctgtgactgagttatgactggtgtcccaaggaggctcacagaaagaaagcaggccccgtatgcctcccaggaaagatgtgctggggacagacccaaccctggtggcacagcatgccatgcccaggcctcgcattgcgtccaggcactcaccgaacagtgagcagcatggtgggcggtagatgtgtcccctgctgggagggcctaagtatggaggcaactggagttgggagaccagcccccaaggaacccgacagaaacactgaggaccgatattccagcttccccatgaagcaagacctcaaacatcccagtgacctggccaggctgctgaaccccaagtctgcttttcccagcagctgcctcctgttgtcctttctcccctgtcttgtctggcactcatgttctatcacttcatccttttcctctgctgctttgtcctgcaccccacatcagcagatctgttcaacccaaccgtttgccttctcggcgcccagccctgggggctgaatgctgatggaggaaatcccaccccataacacactggccccaccacacgagaagggaaggcccccatcctctaccgggtccttcacactgcaaggcagcctttctgggtttccctcttcagcactttctcctactctcatgagcagttatttcctgtcttgacctctctcttcagagatctgaccctacagactcccccactactttggtcaactctgactcctgcttcacagagaaaatggagccatcagtcaagaacttgctcaccttcctgcagtcattcctacaaatacagctacactcgtgccatccttgacttcctctctcctgtgcaaatggactccacgttccctctgcactttggattccatttgcatccacctcctggaagccttccatcatcagcactcccgtctctttcatacacatttaatctttcattatccagttggactccttcctattttagcatgtaaacacaattaaacattccccttaaaaattaaaacaagacctgttttctgctggctcgtgagatctgaagttaaaattacaggaactctgagccagttgttttaaccacaaaaatttaacaatttttaattattaaaaattatatacacatattaaaaacaaaggtaatccatactcaaaattcatcacttcctaattttttactacatgttactactctcttgggccttgaggttatatatgcctattgcgcctctccagggaggagattccagagaatggtggccacagcacatctctttccaactccatgttcagcaacatccctatggtagcttgaaatcagccaagtgggaggagtgacatcgcagaaaccagcaaacgctacaaaccatgacgttttccctagagagctggctgttaaacattcatcagcattccattgacccctctcagctccggattcttttctaggtcctaccttctgtgcctcttcacagctaaatttcttccaaaagaagtctacacccacggtctccactgacacaaatgggttctgcacctcttgttccggttgaagtgcccttgactacagagcagtggcctgctggagattccatcctccatccttgaagccctcaccttcaggggcacagccactcactcgctgttgggaccttggctgccctctgaggacgcctctcagctcccctcttaaagactacatttccccagtttgtcctcagcccccatgcacttcacatctccccagcacactcctgagcttccatttccagctttgtgccagagatcccacagctgaatatttaatccacacccaaatatctgactgtctgctgcacatctccaatctgttgcccacaaatactgtaaacttcctgtgaagaaaactgaaatcaccctcctccctcaaccttcccatcccaccagtagtgtcaccatccaccagtcccaagccagaccctgaaccatccttggcaactatctcaatgagcaaacacacccattcccctctccttctgttctcctgtcctcatactcttttgtcattccttggtccaagccactgtcgcatctcaccaaatttcttgtgcagactagtccaactagtctccccgcttctgacctcttcattccaggacatactccatcctgcagacacagtgatctctctagatgccaaatttgatcacattattttcctgcttaaaaccttcagggcagtcaggtgctgtggctcacatctgtaatcccagcactttaggaggccaaggtgggaggattgcttaagctcaggagttcgagaccagcctgggcaacatagggagacctcatctctacgacaaatcaaaaaattagccaggcatgatggtgcacacctgtagtcccagctactcaggaggctgaggtgggagaattgtttaagcccagaagatcaaggctgcagtgagccataatcatgccactcactgcattctagcctaggcaacagagcaagaccctgcctcaaacaaacaaaccttcacccactgcactctagataaagcccaactcctttagcttcgcacacatggcttttttttgcttttttttttttttttttttttttttcagacggagttttgctcgttgcccaggctggagtgcaatggcgcgatcttggctcaccgcagcctctgcctcccaggttcaagcagttcttctgcctcagccgggtagctgggtagctgggtagctggaattacaggcatgtgccaccatgcccagctaatttttttttttttttgtatttttagtagagacggggtttctccatgttggtgagcctggtctcgaactcccgacctcagatgatccgcccacctcggcctcccaaagtgctgggatgataggcgtgagccatcgcgcccagcccacatggctctttttaactaccccccacttccagccattccatactatgggagcaccttgactgatgatggggttatgtcctgataaactcattataagttgaaaatattctaaggcaaaaatgcatttaatacacctgccctactgaacatcatagttcagccagcttaccttaaacatgctctgaacacttacattagcctacagctgggcaaaagcatctaacacaaagcctattttataataaaatgtcagatatctcatggattttattgaacactgtatattacatcaaaattgcaatcattttgcaccatgataaagtcaaaaaatcctaagtcggggactgtctgcactataaattctcccaaaatgccacctttgcctactgctctcccttcacctgtaatgttttccctgtgcccactcagtcctgcttcccatccacctagctagtagcttattcactcttcaaggcccagcctgggtatcagcgcctccagaaagctaatatgacctattggagctgctgggtgccccctgccatgtgcaccttgggtttctcaccttcagaccactcagcatcctgcatgtaattattctttgtgtgttttatttggctgccttccccacgaggccataagcacctcgagggcaggaatggtgcttcatccagcacgtttctccagtttccagcctggggcctggctataaagcaaatgctcagtccagcattgcggaatgcaagggtaggactgagctggatagagaggaggggagcactgtgtgagcaaagggatggagacaggaattctgcacagacgctgccataggcagaaagagcccactgatgttccagaggaaggccgagagggctagtttggacgagaccccaggaggtcttgagtgtctcatcgcagtgccccccactgctggtgtgatctcaggctatgctggccatgctgagggcgaggagcagatggcagtttgctgcccttgcttgtgacctctgccccgcacaaggtccatcttgaccctgggctctttttctcctctcctgcaggtacgacaccatcaccaaccaatgggaggcggtggcccctctgcccaaggcagtacactctgctgcagccacagtgtgtggcggcaagatctacgtgtttggtggggtgaacgaggcaggccgagctgccggcgtcctccagtcttacgttcctcagaccaacacgtggagcttcatcgagtccccaatgattggtgagaaccagcggtgtcctcagcccagggccagggtcgcatccctgccttgctgatttgttcagtatcccatgcccagaagtcaggctaagcccaacagctctgcagacccagatctagagggtggcaggagttgccgagcccccagctcaggtgtctggagaggggcaagtgagtcaaggctccaggttcccctaggccccggacccatccccaggccaatcagtcacttgttggaagtctttcgagcttccttccctggagggtcttctgggaaagaaaaggagagggaagtccaagacaagctgccgtgacctgcctgctctgctctcctcacagacaacaagtatgcccccgctgtcacgctcaatggcttcgttttcatcctgggcggggcttatgccagagctaccaccatctacgaccctgagaaaggaaacattaaggcgggcccaaacatgaaccactctcgccagttctgcaggtgagaggctgcggcgccttgactagggctgggacggaggagtgggaggaggaggggtgtgaccacaatgatttcctgccatcagtgaccatagcaattcccaggcccagagcagtggccctccccctccaaccacaggagtgggcattagcccagaccagtagggtggagcccacggcagcctctggtccaggagcccaaccccggggctccagctggccccagctccagcagaaatgaaccatttcctgaaggcatcaaggctaccctgctctcagtgagaggtgaggtcagcttcccccaggaccacctgccccatcacagacagaaggcagtgccaggccagagctgtgtgatgccctacagggacaagtgacttcttgggggaatgctctgaggacatgaacgatcctgatggctttgggagctgtgctcagagtcccaaaggctgactgggcaaaagcacacacaaacccacccctgcaggcagagaaggtagagggctgagtgtggctcggtccccaggctttctggccctgtggcagcgagacaccagtccctgctcttccagccccatcctttcctggactaagaggaacaaggaataaaaaggggccccaaggccaggtgcagtggctcacacctgtaatcccagcactttgggaggccgaggcggatggatcagttgagatcaggagttcaagaccagcttggccaacatggtaaaaccccgactctactaaaaatacaaaaatttgccaggcgtggtggcatgtgcctgtaatcccagcttctcaggaagctgaggcaggagaatcgcttgaacccgggaggcggaggttgcagtgagccgagatcgcgccacggcactccagcctgggtgacaggaaaagactccgtctcacaaaaaagaaggggcctcagaaacctcattgtcaggactcccatagcagatgcttcctgaagacatcttgtgcctatgtagaggtaactgcagaatcttcagtgtgggaatagcatgaagtacttagagtgcccattgtttgtgtagcatagctagaaaagatataacctcctactagcatgtcagtgaccttggacatatcccttcacctctctgaggaagttctatctgtgaaacaggcggttggaccagacaactgctaagctcctgttggactgagatttcacaattcttgagccatacttccatgtcatgtaccctaatggtggcagtgtgcagagcacagtctgactaccccgtccactgatgcagacaactggagcattgcgctccacttgggaggatgctcgcaccttctctgagactagaagtaaatgggaaagggccaggcacagtggctcacgcctgtaatcccagcactttgggaggctgaggtgaatggatcacgaggtcaggagttcaagaccagcctgaccaacatggtgaaaccccgtctctactaaaaatacaaaaattagccaggtgtggtggcaggcgcctgtaatcccagctaactcaggaggctgaggcaggagaattgcttgaacctgggaggcggaggttgcagtgagctgagatcacaccactgcactccagcctggtgacagagtatgactccgtctcaaaaaaaaaaaaagaatgggaaagacttaacggcaaatggcagagttaagctgggtcttgcaagataatcaggtaataggtgcaccacagaaggaaaatatgagggccccagatggcatgaactaagggagagaagactggaagcttcagggtctggtaagaagtccagactgatgtgttctctttaagagatttcagaaacgggtggagcctttgaaaaggtatgtgtccaatgtcagggaatagccaggaagaaatggccattagctgaaatgaaagagtgtcagggctagaaacaaggatgtggacgtcagtgcaaagaagtagctgaaatgcattaagggagtcagtgcagagaggggccagatgctgagccctcatgatgagaggagctgactgagacaacaggagcaagccagtgagtgtcacacagggaaggggtccaggcacagccatcggtcaccctgcagagcatgcccggcccttgcaatcctgggtgggcagcagcaccaggtcacacagaagcaccttggcaggtggagctcccagtcaagtggctgacattcaattccagctgagctccttattattctctctcgtcattcttgtgagtcatgttcccaatttgatttgagcagtaggaaggctgcgtgtgccacacaagagcctccagaaagcctcagtgacctgagctgagtgcccgcacagagatctttcgtctcctagccatggttagtcactctggcggggcagggagggagcgccttctgccgctcgcagggtggcatagcacggcttcctgactggccctggaggacaggtgtttttcttatgccagcccaggttagagggcaaagaagggcagcaagatcccagatgccttctgcaaaaggcacaggcagcctacaacaggacacgacgttgagaacctatctccagggccaagttggaagtgaaatgcctaactctgtccccgctttcccccaacagtgctgtggtgcttgatggcaagatttatgcaactggaggtattgtcagcagtgaagggcccgcgctgggcaacatggaggcctacgagcccacaaccaacacatggaccctcctcccccacatgccctgccctgtgttcagacacggctgcgtcgtgataaagaaatatattcaaagcggctgacatcagcagaaagcccacgataagactgtggacaagtctggtgaggcaagtgccacgcaatgataattttccagcgacaccaacaagaggccaacaaaacacaatcaaggaactcactgcgctcaacatgttgaatattctctacattgaatgtagaaaatcatcctcgcctttggatgaaacggaggcaccgcgcttggagccgcaggaaccacgatcccgccatggggctggctgcctcctgaacaggggcgctcgctctgccaggtgcaatagagtttcacgtatttttcaactgggagagagaagctgttttttccttcctgcagagcaagcttgatccctaaacaaccatagatcagttatcttatgacaacattaggcatcaggctctcttggaataagatcaaagtgtccttatcactttgattcctacttttgttttttaaccgatctacactttcagtggccgacagaaaacgagggacaatactgtgcatcacaaggcctaggaggctgctggtccccactggggctgaagagaagcccagctgcccacgcggagccaggggtggcagctgtgggacagccggggagcagggacagcggtctgtccttcacaggtttttctactgtgtttttgctggagaaggacagtgattgcgctagctttctcttacccggtatgaattatttagatttctgaggcattttcttgataaacaaaaggctatttttaagtactgagaggaggagcaggccacaagagggataatgttgtgggaattcccaaagctctttgtaggtagtgccagaggggggcttttgctctcatttttctatgtgcagaatagaggatctctcctggggtgggcgatgcccccattttatttttagaaaaagtaactcccagacagccccataaaagctgtgcccaaggaagaagagtctgctctagaaggagcccggttctggctcaggacaccggcccagctccctccatgaggtcaagctgaggaccaggccagtgggaagggaaggagggagaattagcgtctataaagcacaggagactatttttgatattcatagctatatattaaggcacctgccacaagagctctcaggatggggacagccttcttagtggagccatggcagcaaggcctgagggcatgaacagaaccactcttcttgtcacatacgaacctgagaaaagggaagccaggagggaggtcacaccatggctcaaaagggaaaggccttcccacttgtccttagcccctcaaacctcacacggtcaacagtttccattccagggcaggagaatgctgccgccactgcgctgttgagttgaagttggtaccaaatacacatttaccacttttatatctgggaagtcaacttgccatcgtttcatgataacaaccatttataagagaaaaagacaggacacgctttccatcgttcagtatttgatgacacaaaattccagttctaacgttgggcatcaacttctagcactacgagtgtggctcccacttggacaagataccgagcttcgttatgcagtttttaatattatttattattttaaaaagtaataagcacaaaactacatacattgtatgtcatttaaagtatttatgtcaaacagggtgcaagtgtgaacccaaggactggagcacaaattcctaactgcctggggcagggctaatgttagcattggtgtgcgtctgcctccaaaggaggttctagttgtcagcgagactcaacacagatgacattgaaattcgtttctctcctcatctatcacactggagcaaaactggctatttctgtgaatgatataaaacagggttctctgtaatggtattgtacatagtatatgtttactgttaagttcttgttatattataataaatatatttatagatctagacttggaagccaacgtaatctttgtgtgccatcgtcctgccacagggatgcaaaacctgttctacccctcatacatcagctgtatgggttctcttatagactttagtgcagaacttaatgattagaaaggatgggactccatattgagggaaggtttagagttgaaaagccaagaagacaattgaaggtaaaagttgaaagggacttgcaaacacgctggcactggctctgaggctcttcctttcattgaagtgctcttcttattacacttgtgcaactgaaagcttcaaagctgttagcttcccactggtatcactgctgtgccagggacccacttagagccacatggcaagtccagctcatgagcctaagaggagacacaacacactttctccaggaagaggaatacagggtgatttcttttcttttcttttctttttttcttttttattgagatggagtttcactcttgttgcccagactggagtgcaatggcgcgatctcaggctcaccacaacctccgcctcccgggttcaagcgattctcctgcctcagcctcctgagtagctgggattacaagcctatgccaccacacccggctaattttgtatttttagtagagacggtggtttttccatgttggtcagggtggtctcgaactcccaacctcaggtgatccacccacctcagcctccgaaagtgctgggattataggcgtgagccactgcgcccagccagggtgatttctatcctatcctaaaatccagtcggggggcctcactgccttcttcagtcatggctggtgctgctctctaggctgctgtatagacctaccttgctatgctaaggacttgcgtgccaggctccctggggagaaaaggtagagcgccagatgggagcacctgtcctctggcagggaaagtagtttagatttcacagattcgcagaaagcatattggccagctttgtcatccatgtgaagagcctcacaccattaattcacaaatctcaccaagactaagggtctccttgccaaaaaaaaaaaaatcggaaggtggtggtcagggtaggcgagagagggagatgttgagagaacttggctgaggctttatggtgagtggaccatactcttgtcaaataaatatttgcagtgataccttcagtcctaaaggatggcgaatgtctagaggatgccaatcatgaagagctgaaattataacttgagataaaaatcaagcaatcatcttgttaactcttttcctgtctacctcatttccctaaatcaagagaaacacattctctgggtctacgaagagtctgtgtatttcagacttaactctggggggtgaacaaattgcattttgccataaaagccatgtgtgtccactatatcaggagtccatgagacaaaggggagcatccaagtgaaaccatcagagctgatgtggatagtgagaaagttcactgtgacggccacaaacagaaaatggttcacattatgcatgtgt

SEQ ID NO: 311 - DNA, 68945 bp, Homo sapiens
  source 1..68945: mol_type = genomic DNA
gagggcccaggagcccaggggctcagctccaatgtccaggtctgagcaccagggtgcagcgggatcaggctcctggagcagagtctgcctgccacttccgcctccttccaagacagggactggggcgctgcaggccctgtggggcccacagagagagagctcagggacagctggctgaggccaccctctgtgagactcctcctctccagctccagcccactccaccttggcttgctgcccaagcttccaaacacccaaggatgggggaggctgcacctgactgctgactcggtggaccagggtgggccccagggtgggcattttcaataaggtggggctgcctggctggacgcagggagtctgcccagcacctgccccactcccagcctccggcttcagtgcccacctggctcccggggagctgagcccctgaactccctgccaggccagagtgacagcccgggtgaccgaccaggggacagagtgctgggaattcacgtccctgaacacactgcaccctcccactctgcggtcaaaagccctgctgctccttcaagccaggagcatggattaagtacctactgtgtgcctggccagccacacggacggggagctgacagccgggccctgaagccgccctctctcctgtgggagttctgggggtggccggggaaggtgagattctcctccaccctccctgcctcttggccgagcttggggctatcctggctcttctgaccgcggcactaccgtgggccggggtcaccctggcgctgaagaaagccccggggggcctttggggcaggaagaggtcaagagccccaggaccccccagggtcccccaggaccggggagggtcgggtgcccagtgggtctctccgatgcctccaggtggggatgaggcagcgttattgccccacccccaacatccccgggcctccgaaagaccctcgctcaggagagaccccggcccagcgaccgccccgccccccaccccgggccccgccccccaccccgggccccgcccggccctgcccaacgccgctgcagaggccaccccgggactgcggcagccccgcccggcagcagcgggggtgggacgggggcggcgggagccggcgagggggtctgcccgtccgagctttcctgggcgccggctccgcccctcgacccttggggcccaggtggggcgcagaccccgtggctccccgcggaggccacacgcctggctccgcccccggtgcctcccccaggaaggagcgacgttccctaggcgccgggtccggacagcgccgcgcagcccccgcgcaccccgcgccccccgcgccccccgggcccgccccgtatccctgaccgcgtcccctggagacactgcggcagcggcgggcgggcgggggcgggcgagggccgggcgcgtctccatggagccagggcgcgcgtagccgagcccagcccagcccagccggaggccccgggggcggtgcgcggcgcggccgcaggatgcaggccatggacccggccgcggcggatctttacgaggaggacggcaaagacctggacttctacgacttcgagccgctgcccaccctccccgaggacgaggtgagcccccggccccactggggggccccttccgccgccgaggggtccgcggagagcgcccggggggaggacccgggaggggctgtgagctcccgcctccccaggcgccctccatggccgaggggttcccaccgccgttctcagcccccgcgttaggattttcacccggaggggacagcacccccgaatgcgcacgggacggcggcgggtgggcagcccctgcagaagttggtgcgcggtagctcctggtggaaaccctggcgggacagtgtgggggcagcaaggaggacggaggggggtctgcttactccctgccgggccccaggaggccagcggggtgcagagcagcagagtccaatcaggcgccgctcaggagctgggggatgaggtccccggagctgaggttcaggagcggggggtggggggagcgctggatgactgccccccgagactgagagctgcttcctgctctctggttttccgggccttcacccaagacccccctaccccgcaaggtgcagaggggctctgcctgccatctgcataccctggcgcttctgctcatggaccgcccaccctacagcaccggctgcccagacgccaccttggctgggtctgaccctgtagctcagctctggcttggctgggatggagtggacaagccaggcccggaagcatgagaggtggcccccaggggatacagcagctcccagagggaccctcaccctccagggatccgagatctgccaaacctccaacaggcaagagcccagacgctgggcgcctgcgtctccgggtgacagcgtcgtcacctgcagccattagtgggatgttgtggcgccctctctttaaagccggccaagtaagcctggagcagggaatcccggctgcagcagccgcgggcctgaccccctcgcagtccccacctgctgccccaggggagtgggctctgaagggaccgggagtttctgctgtggaagcaccgtccttctgggaaggttcagccccaggaggccctcggcccagccacctagaaacagctgaggctgtgcgggggttggcgatgcccccgcccccaccatggcctggattcggtgcagttgaaggctgcagagaggagcagccaggggaggcaataaagcttccaagatcacctcggctctgaccgagagggaggggcagcccgcagccttcagaaacgccccaggacacatcccagggtatctgttaggaggcggccctgaggacgcagctcttcccacagctccttcgtgcatcagaggcctgagccttgagggcctccccgctccgcacacggaggcagcagccggtgccacgcacacaacacgccgcgccaggcgcgagcccacttggagccacaggctgtctttctgcacactccccactcccgctccccacccccacgcacacaccagtgtcctcgggccggccggacagctcccggccggcacagtactggggtgggtggctccatcctgtgacgtccaccaaggcctccaggtgaactgtcatcccaccgagtttgcagcgtgcagtgggaacgttcaggtgggcccttcgcagacactcctggaaagcatcgggtggtccctggcccaaccctgtgcccagtactgagcccaacacaccccatgtctcagaattcccctggcgttcagactctgcttcccacacgtgtttggcttggaaggttctgaaatctccatcggggcacctgacttgcatgggaaaaccgtcctgggtgaggtgagggcacggtgaggttgcatcatcatcccagaatgccggaaggccaagggtgcagggcagctgccgggaaagcacggtggcgccaggcccaggacatatgcaggcttcataagatgtaggaactcactcattctacagctaattataatggctggctccatgatggggtcaagaaatagacccctatggacacccaccggagcccctggaatgtccctcccttgacatggtcccaaagaaaatccaaatggctgctgaacatgtgaaaagatgtttgctcattgcaatcaggaaaatgcaaaatacacccccacgaatgccttcccaagaccgccaggctggcaagaactgaagagcggacagcggcttgtgctggcaaggacggcgcagcagctctccctcgcgccagtgggaggacaaatggagcagcctctttggaaaacagcccagcattcgctggtgaagtagaaggcaccagtgccctgtgtcccagcaacttcactatggtgtgggccccagagacacgtggccgtgcgtgtgtgagaacactctcagctggaacctaccagagcatcagcaagtgggccagcaggtcctggaggaagtgaccaggttggatcccagtacaggcaaagaaccaccagtacacgatagacagggagatgttctgtgggggtgatgcaaggagggcttcctggaggtgtcctgcccgggattcccatgagatttcagtcactgtggatgggggtatgggatctgaggcagaacagtgcaatccaggcagaacagcggctgcagaagaggcacacagtccaggcggctggagtcgatggatgggcaatgctggctgccccatgggaattcagatgagacgaagagggtgcaccggtttgggtgccagagcaggacgtgtcccgggtccctgagaggcaggcagcactatcatccctcccagagttcagcaactgcctcccagaacctcctgtgtgccggtgtcaggctgggctcagaatctgaggctggacaggatgcagttgctccctggaggggcacacagctgggggctcccagtaaagaagaggacgtccccgctgcagggtccatatgacatctgtgccaggatgagctcagagcagaaggcacctcgggagcagaggtggttttgtggtgggggcctggcagtgtgaagagagctgtcaggaggcctggggattggcagccagtgctcccagctgtgattggagttttgtattagtcctgttagaatcccacggctgaaaaaaatcagttggtcataagacagtgtatttcaaatgcgccacacgatctaggcgtccctgtgtaaccctggctcgaagtctgcctggcagtgtggcggggggtgtgggagctttctgaatgcacagggcccctaatggggacctgccatgagataagggtcctcggtgggaagcgtgccctgccctctgagacccagggactggctgatgtgctgctgccctggagagcagcccagtcccgggggttcatgtccacctgccttcccaaatccctcctcccacctgggatgggggtggagttcgtggccacctgccttcccaaatccctcctcccacctgggatgggggtggagttcgtggccacctgccttcccaaatccctcctcccacgtgggatgggggtggagttcatgtccacctgccttcccaaatccctcctcccacctgggatgggggtggagttcatgtccacctgccttcccgaatccctcctcccacctgggttgggggtggagttcgtggccacacaattgcaaagtggggaccagtctttcctgtcctgcaaggaacaggtcttaggtggtccctgctctcagacctaccccatggctcacccaggcacgccctgctagggatggtaaggggcagggtgggtggtcggtgggctggactaggtcatgaagaaccctctgggcctgctcaagaggctgggtctgtgccggcagacggagtcactgaaagctggccagccacaacaaggtcagactgtattggcaggggcaggagaggctgaagtgtggaaagtcacgaggccccagcctgccgtggggccctcgtgggtgctgggcagacaggtgcgcaggaggcggcgctgggcagacagacaggcgtcggccagctgaggccggcgttgctattcacagcacgtcacctccttcccaagtgtctgccacagcccattaaactcctgtcgaggccacctcggcagccccgcagcccggctgggcgtattttacttgagcacgaagcttcctggcccagctgtggacttgaacctacctggtagcaaggctgagagccccggggtctccaagggccccttctggaggtgactacaggacgcccacagctcaggactacaggacgcccagatagctcccgaccttgagggtggtcgtggggttgtctgctgggatgtggcggggggagcccaaggacgtgggatccccaggctgctgagtgctgcctgtgtctctcccagtcctctcgtcctgtcctggcctcttaggcctgtctgacccccccttgctcacccagccagtgtggattcgggcaaggagggctaattcctctcacctgtgccagagcagggtggaggctgcaggtcccagagggcaggtgacccggggcccagagttcaggcctgggagccctcagcacatgacaagaccccctgggtggccgggctcaggaccctgtgtgagcggaagcccaccctctggaaagccccagagaggctgagaccatcctatccctgaggggaggcttcagccacagaccccatggaattcaccgctaaagtcatccagagaatctccgacggaattcagacacgcccacctctcatgggtgctggggctccaggtgtccggcttccctgaggggaggagggggctgcccatcaccaggcatctcccctccaggtctgagcaggagggcgtgctgtgtgcgagtggtggccctgctggcacggctgacctgggctcccttcccgggtccacgtgtctcgacaccattctgtgggctggcggcaggcgcctgacctgtgagtgacagccagaggcaccccagggccccgcagggggacggggaccggctgagacgcgcctcatgctgactcccttcctcctaagcagcacaacctacggggtcctcagactgacttaccgcttggtgcacgtctgtgcccgtgtttgcaggcacgtgtgcgtgggcatgttgcgctgtgtgcatgtgtgtgccagtgcacgggagtgtgtacatatgtgtgcgcctgcgtgtgcaggtgcatgggtgtgtgcatgtgtttgtgtgtacgcagtgcccaggtacctctttaaccagcctcacaggcgtcgctgggagcttcgggctctctggagtcctgaggagtcctgggcggtgctaagagggcggcaggcttgagcccaaatcaaacacctttgatcgatcacgggccacaggaatggggcagggagattcccgccatagaaagagctggaagggcctgggaaatgatgtcatcaagcccctccctggaccgcaagaaggagatggacgggatgtgccaggaccccacgaacagacgcagagccagccccatggccaggccccaccgggcgcccatgccctgatcccgtcgtttgttggcctcctgctttggtttgagcccttcatccctttcctgtgcctggggggcctcttgcagtgccagccgctggggcagggtagggggaccggaggcaggaggtgcctctcaggacatcagcccagtggctccagtacagccagagccgccctgtgcactgggggagggggggccagcgatgggggagaaggggcctctgcctcctcctcacgggccccacccatagtgtccaggctgcagcccccggccaccccctcctacctgcacatggggtgccccggccggggagcagcacacccaagagggccttcagctccatactcgggtgcgtgcgagtgtggattgtgcagccttgtgtgttcctgtgagggtgtgtgcaccaagtgtgggaatgggtgtgtgcgggtgtgcatgtctgtgcgtgcatatggtcagtgttaggcatgtgtgcggtggcatgtagtatgtgtgtgagtgtgaggtgtgtgtgtgtatgaggatgtctgttctcattgcatgagtgtgtgtgtgtgaagcggatggaactgtgagtgtgcacacaccttgcaccagcgtccgagtgttactgtgtgagcgtgccctgtgttggcgtgtgtccatgtgggatgcatgtatggggatgcgtgtgtctgtgtgagggtgagcacgtgtgctaggtgggtatgtttgtgcatgtgcatggggggggtgtgggtgttggtggcaaccatcgtgatcacagctgagccctcgcggagtccaggagcccactcggatttggaggtgagcccacatgggggcggccgagccacatggagggaaccgccgtgactgtgtcctccgtgtgaattgcctggaacaaatgttggcagcgcgtgtggttgtaagtcatgtgagtgtcaggatcacgccccgttagctctgcacgagtccacagttggggatgtccactccgtcgcctcgctcatctgttggcagcctccacaggccagtccagccgtgagcctgcggggtcggggtgctccacggagcaggtgacccagcagctctggccgagcctccgggaggaaggccccgtgcccaggctccaggagccgacacctgctctgggcagcacgccgacggtgccaccaaatgttccgtggctctgacgtccagggaacagcaggacgactcttgaaacaaaatgagacgtggtctaaagccctttccctgacccacgcgttgaaacgctgccacgagtcgtccgtttccccagggaatcgtctcggtgggggtgccggggcctggctgggggtcctgccgggctcacggccagggccggtcttggcaggagaacgtgtctctggctgacatcctctccctgcgggaccgcggcctcagcgagcaggaagcctgggccgtgtgcctggagtgcagcctgtccatgcggagcgtggcccacgccgccatcttccagagcctgtgcatcacgcccgacaccctggccttcaacaccagcgggaacgtgtgtttcatggagcagctcagcggtgaggcggcggtggcggtggcggcggcggcgggcacgcggggtggaggtgcctttcaggggggatgtgagcactggctctgccggagcagatgctgggagcatgcccggacccgggtttcctgtggagaccttctcttccttgggagggactcaggctggagagtggccgagggtccgtgggggtgcctgctgtgccacggcagtcacgcctaccctcagacaccagagggacactcggcccgccctgagccccctccgctcaggacttcccctaagggcaggctatgcccctcttctgtctcccctgagccagtcccgcctgccctgctgtgagtggacgcaggcccgggagggtgggacgcccctgcctccgtgggtcagctgctcccactgcgtggcccctgcccgggagctgattttccctggtgaatgtcttcagcttccttcttgggaaagtggtagaacccttccctcttccactttggaacccatttcccatcataaccgttaaggagctgatttccctttttcatggcctaaaatggtctggggacaccaggtctgcggggagggaacctggggccgctccctctccaggcccttctcagctggcgggttcaggtttgcaggtgtgaccagaagccttctctccttctctctctcctccccaagacgaccctgagggtgccttcgttccccccgagttcgacgtgaccgggaacacctttgaggtaagtgcaggtgggggtaatgtgccacaccccccttttacctctatggtggcctctgccattaactcagaaatgcacctgccttggggcgacctctgcaagtggcctctggccgggagcggagccgctgctgcccggttcactgggctatagggacggcctctggggcacacccggcttcgtcccctgcagcgttctctgtgggcagctcggactgtgggttctgtgggcagctcggactgtgggttctctgtgggcagctcagactgtgggcagaggctttggctacgtttgtcatcattaccattttatagcaggttttctggaatgcgaatttactacacttaacatgttaaaagtgaccaaaatgaccagtgatgatcggcagggaatcacagctcctctgagggagttagcagccgggccactcacagcctctccagacacaaggcctccaggcacagctcctgggtatgggcgtgggcatgggccaccctgggggcctcaccggcagagtcatagatgctgctgctcccagagcagactccagtgcagccccttggggaccctttgcgtgggaggagtcgggcaacggcagcccagcgccttgaggtcagcacctgtgtggccggctggagaggggcggaatcaccccggggccttcagagtcgatcagtccatcaggctgggctctgtccccgggcagggagtggcccattggtggttcctactgtcacgaagcccatgggcagagaaagtaaagcaatccttaacaaataagtaactaggaactcaaagatcttcccaataaaagcccatcagctatgtcatgaccttaaaatttgaccttgaaagaagagtttgggggctgggcatggtggctcactcctgtaatcccagcgctctgggaggctgaggcgggcagatcgcttgagcccaggagttcaagaccagcctggccaacatggcgaaccccgtctctactaaaaatacaaaagttagccggatgcagtggtgcacgcctgtggtcccagctactcgggagtctgaggcaggaggatctcttgaacccaagaggtcgaggctgcagtgagcggagatggcaccactgcactccagcctggctgacagagcaagaccttgcctcaaaaacaaggaaagaagagttttgggatggcttcccgcaccctgcttactttcactctgaaacaagtgaggctggagcccttcaccctgggaggtgggcagggtgccccaggaggcctctgctgcgggggtcctacattttagtgcaccccagcgtccagaacccaactccctgcagcagtggcctggtggccgtgacgcggcacgtggcctggtggccgggacatggtgtgtggcctggtggctgggatgtggctgtggcctgtggctgtgaacgcagcgcatggcctggtggctgtgacgtggcacgtggcctggtggctgtgatccctggtgcacatgagggagttttagttttgtgcttgcgttcctagtcatgtcataatccagctcagacctggacatgacctcagcccaggccgtgcccggtccccctactccgtggttcccccgtgggactcgcattccttcatttttatcccgcgttgcacgttcctccaagtcctgttgtttcctcggggccatttttaactttctgaaaagacttgaggccatctgtgatcttccaggacttccttttatgtatttcttgttaaacttcatctgcagagcactgtgtggccataatgtggcacctgctgtgtgttatcccgtcgggtgaaacgctacatttaaatccccgcttgtgaggggactgaggggtgcgcaggtgtttcctggtgtgtacaccaagaacacatcttggcgaggtttctctagggtgcatgcccaggaggaagtgtggctcgtggggcaggtggacgtacatctgttcctggaactcccccaactgcaggcccgagaacacggtgtgaggatcgctggctcctgcaggacgtggacgtggcaggggcctgggatctggggtctggcctggggtctggggtctggcctggggtctggctcctgcaggacacaggcgtggcaggggcctggggtctcacacacaggacagcaccgcgctgcatctccttcctgcgtcataggggatgtgggtgaggagtgcctctccagtgaagctttataaccctaaaaagtattgtctgcccctaagagcgtttgcttatgtgcgttctgtctcttcatgtttatgatgatataaattaaaaccaagacattttaagttatctattaattcatttaaaaatcacaatacccattgcatgttaacatacataacatttttatgaagaatatttttctttccaaaattagtgagaagagtggcattgggttgcatatttgtaaatctttcacgtctgggttgtggaaaacgcctggattttcatggcagcttctgcattcagtcggctgtgatatcacatcacgtggccccagccccaaccccaagcccaaccccagccctaaccctaactccactgtccgctcatgagggaatgggatgaccaaggcaaatgccgtctcggcatcattacaggaagagtttaacctcttgagccacactcagagaaaagctggccgacggtgtcctctgctgaaaagtagttgctcgattttaatataatcaaatgttttaatgcttcttctactgttagggtctaaccttcacaagaaacctttcccatttcaaggttgagccgatagtcactgatattttctacgaagagttttaagttttgtttcacatttgatccacctgaagttactttaacgttgtaaagttttgctgtaggtgtcttagatatagtttattagattttcctcaggaatgtgatgttttttgattctattctaaaattcattgtcctctttttgttttgttttggttttgaggcagggtctcactctgtcacccaggctagagtgcattggagcaatcacggctcactgcagcctccacctcctgggctcaagtgatcctcccacctcagcctcccaagtaggtggggctgcaagtgtgcaccaccatgtccagctaattttttaaaatttttatagagatggggtctcactctgttgcccaggctggtcttgaactcctgccttcaagtgatcctctccccttggcctcccaaagtgctggggataaaggcatgagccactggccccggccaattgtattgtcctctttttaattacatttttctgtttgtttgttgctagtctacagaaatgcaatgcacttttttttctttcgagacagggtgcagcacagtggcatagctcactgcagccccaaatttctgagttcaagcaatcctcccacgtcagcttcctaagtagctgagactgtaggcacacgccaccacacccagctaatgtttttatttttatttttgtagaggcagggtattgttaggttgcccaggctggtcttgaactcctgggctcaagtgattttcttaccttggcctcccaaagtgctgggattacaggcatgagccactgtgtctggccacaattcactttagtatctttattttatatccagccatcttgctaaagtttttttaatatttctaataacttacagattcttttagttttcctatttaactgatcaatcactgacaaagaaacaagtgttggttcctcccatccgatggtcctgctacaggttttccttccttctcttacttgatgcagcagggaacagcaatgagtcttggaacagaagcagtgtgaggctgggcactgtcccatctcagggagaaactgaccactccccccatcccccattctaaaaagagcgcttttcaccttcctcatccagaatggcgcccgcctccaccgcgagtcccccttgatgcagagtttgatcgtgaatgtgtgtgtcaattttacaagatgtttcttctgcatcctttgacatgatcctttaattttttcttaagattttcatattcacatctttattttcttatattaaatcatcctttcttacatagaaaaacctaaattgggcaagtgtcttgccttttgtatacactgtttaattggatttactaacgcttgcttcagattgttgcgcatattggagtggactggcgatttcccattttgttgatgttttcaccggcctcaggattgttctaatcctgtataagcagcaccccctccctttctttgtcctgtttatttaagaatgggatgatctgttccttgaaagtctggtaaaactcacttacagggccacctgttttctttaggaaagatttttaactactgctcagtttttaatagctacaggactggctgggcacagtggctcacccctataatcccagcacagggagatttggggaggccgagtcaggaggatcacttgaagaccagagttagagaccagcctaggcaacaaactgagaccctgtctctacacaacattttaaaaattagccgggcatggtggcatgtacctgtagccccagccgctcaggaggctgaggcgggaggactgcgtgggcccaggagttccaggctgcagtgagccatgattaccccactgcactccagcctgagcagcagagtgagacgccacttcttaaaaaaatagttataggactgatctctggtgtttcttactgagtcagctgtgggtctgctttttatgtttgtgaaatctctggccttcagctgcaggtgctctcctcttcaggcgctgcattagctgcaggtcaccccaattctctgattggacagttaatttgtgctttctcttcccagtctcactaggggtttagttcgttcatttttccaaagagcctcctctgtgtcccgtctgctctcctggcctgtctgtgttttcttttccattgattcttgtttctcattctctcttttcctccttgttctgagtttaggatccatcccttttctgactcgagctggacacttaggtcattggctttcagcttttcttcctttccaatatcagtaagagtacttaaggctatgaatgttcctcaacctgtaggttttgttgcagcctatgagtttgccacataatgtttgcatgatcatttccttctaatttttttttttatttccactgggatttcttctttagcccctgagttattttaacaatgtgaacagattggttttttcttactttttattgagatatacatgcagaaaaatgcagatatcacaaacatacaacttgaaggattttcacaccgaacatctgtgtaagcagcacccagatggatggcagcagctcctgcctgttccccgggtcactgtctggacagcgcagagcagaggttgcggttttcctgtttttgtgcctcctgtgggtgggctcctgcagcgcttgcctttggtggctagtcctccacccagcatcacgggtgtgagatttattccgtgtggccatggaaagcatttattcccaacagtcgtctctaaacttccaaacacactagggcttttatgtgtcattttcattctcttcttaacttctccagcctccaccccatgaggctcccctctccaccccgctgccctgagcaccaatgggctccagtggcccggcctggaagactccgacccctcccccatcgctggcctgtttgcttggcattcatccacgacatgcaggcttagcaagcgtctgggctcacagacagcagggtgagtggggtcctgcctcttgctggttctggtctacacaagtgacagacttgatgtgagacccacaggctggggatccaataatgctgggacatgagaatggggccccaaggctcttgtttgcatcagaggcctccagaggccactgtgagaaggtggagtttcaactgggacctgaggttgagtagggttcactgaatgaagatggggaacttgcaacacggaaggaagggcggtgaagatggggaacttccaacacggaaggaagggcggtgaagatggggaacttccaacacggaaggaagggcggtgaagatggggaacttccaacacagaaggaagggcggtgagtgggaaggttgctgataccaccgggtgtgtatcaggcagtgtcaaccaataactaaccagaaggttatttgctgagttattttctaaataaatggattgatggttggagcatagattattgatgatggatgaatgaagggatggatgagtggatggccaggtggatggataggtggataggtgggtggatgggcaggtggatgggtgaatggacagatgatggtggatatgtggatggatgggtgggtagataggtggatggacagatagatggttaatatgtggatggatgggtggatggatgatgggtggatgaacaagtagatggtgggtatgtggatggacgaatgggcggatgggtggatggtggatatgtggatggatgcgtggatgaacagatggatggttaggtggatgcatgggtggatggatagatggatggttaatatgtgaatggataggtggatgtgtggatgggtgggtggatgggattatgaacaggtaggtggtggatatgtggatggatgagtgggtggatgggtggatggtggatatgtgaatggatgggtgggtggaaagatgggtggaaaggtagatatgtggatggatgggtaaatggatgggtgggtggatgggtggatggatagatggatggtggatatgtggatggatgggtggatggatggtgggtggatgggtggatgaaaaggtagatggtggatatgtggatggatgagtgggtggatgggtgcatggtggatatgtggatggatgggtggatgaacaaatggatggatgggtgggtggatagatgggtggatggtggatatgtggatggatgggtggctggatgggtgggtgggtgaataggtagatggacatgtggttggatagataagtggatggatgggtgggtgggtggttgtatgtgtggaggatggatgggtggatgaatgggtgagtgggtggatgggtagatgaatggatgagtggatggatgggtgggtggatggtagatgaacaggtggatgggtggataagtagatagatgggtagatgaacaggcacatggatgggtgggtggatggttgggtggaggatagatgagtagatgcatgggtgagtaaatggatgggtagatggatggatggatggatgggtggatgaacaggcagatggattgatgagtgtatgaattgatgggtggatagatgggtggaggatgggtaggtgggtggatgggtggatgaacagtcggatagggatggatgtgtggatggatgggtgaatggacggatgagtgtatggattagtagaggatggacgggtggaggatgggctgatggatgggtaggtagatgggtgaatatgtagatggctggctgggtggatgggtgagtggacgtgtggatgggcagttaagtggatggatgggtgggtgaatggatgggtggatggatggatggatgggtgggtgaatgcatggatggatgggtgggtgaatggatgggtggatggatggatggatgggtgggtgaatgcatggatggatgggtgggtgaatggatgggtggatggatggatggatgaatggatagatagatgggtgggtgagtggataggtggatggatggatgggtggatgggtagatacatggattgataggtgtatgaacaggcagatgtatgggtggatttgtggatggatcatgggtgggtggattgatggaggatagatgggtgggtggatgtgtggaggatgggttgatagatgggtggatatgtagttagatgggtggatggatacataggcggatggatgcatggtggatgggggatgggcagatggatggataagtggatggatgggtggacggatgggttccaggtgcctggatggaaacaaaggggaatggagggaaggaatgaataccctggctttccgtgtggtatggagataagttctattctcaaggctgtgggaatcactgttgagagcatgatcccaggagggttgttgctggtctcctgccctctgtgtgtgcagtgcctggtaggcatatgtgcagtgggccctggccatctggatgctcggccgggttttcaaacctctggtccatacttttgcctccacatctttgcccaggttgctcctttgacctggagtgtcctctcttgtcttctcacagcttcactcacatctccatggaatcctccctgacccatagcccacagaggctggccccactccagttccttgaaacttgctgtagttttgctaatgtgctctgggtcctcaggtattagatcccctggagaccggggctgtgcttggtgctgctcagcacccctgcatctaggctgagggaggtgccatctggggttattgtgctcaagccattggccacagccgagaatgctgctgcccactctgcaggaacactgtccacagtcaagctgagcacagctcggaaatgtgcagacgtgccctagctggcctggtcaggccatggcagggccagaattcagatgcagcctctgccatctgagtctgcgttccctgctgccctgcatggcagctgacccagcccacagcagatcacccagctgtgcaccaacctctgctcaccctcttctgctggggacccatgcagctgctgcctggcagagaatgtatccatgtccatgtccaattgtgtgtctgtgtctctgtgcacatgtatacagtatagtgtgtcatgtgcacgtgtatgtagtatagtgtgtgtgtgcatggtgtgtgcatatgcatgcaatatgatatagtgtgttttgtgtgcacatgtatgtggtctggcatatgtgtgcatctatgtagtgtgtacatgtatgtagcgtggtgtcatgcccgtgtgtacatgcatggcatgctatgtctgtgggttgtgcacacgtatgcagtatggtgtgtggtgtgtttcaagcacacgtgtatgatggtgtgcatgaatgtaatgtggtatgcatcttgtacatgtatgccatgtgtgcatgcatgtagtatggtgtgtgtcatggtcatgtgtgtaatgtgtgtgcatgcacatagtgtgtgtcatgagcacgtgtgttgcatgtgtacatgcatgtggtgtgtgtatcgggcacatgtgcataatgcatgtgcatgcacatagtgtgttgtgagcatgtgtgttgcatgatgtgtacatgcatgtggtgtgtatatcatgggcacatgtgtgtaatgtgtgtgtccatgcatgtggtatggtgtgttgtggccacatgagtgttgcatggtgtgcatacatgtgtgtggtatggtgtgtgtagcatgcctgtgtatgaactatggtgtgtgcatgtttgtggtgtaatgtgtgcgtgcatgcatgtagtgtgttgtcatgggcacgtgtgtagcatggtgtgtgtgtagtgtgcatgtgtgtgcagtgtgtgtgtgcaagcatgtagtgtgttatgtcacggacacgtgtagcatgatgtatgtgtgtagcgtgcatgtgtgtgcagtgtggtgtgcatgtatgtggtgtgtgcatgcatgtggtatgtgtcatgggcacacgtgtgtagcatggtgtgtgtagcgtgcatgtgtgtgcagtttggtgtgtgtgcagtgtgtagcgtgcatgtgtgtggtgtgtgtgcatgcatgtagtctatgtgtcacgggcacacgagtgtatcctgtgtgtagcatgcatgtgtgtgcagtgtggcatgtgtatgtatgtggtgtgtgtgcatgcatgtagcgtgttgcatgtcacaggcacacatgtgtagcatggtgcatgtctgcagcactggattgatcctcagtctttgggtgaggacaaggctttcagtggatagtgctttttattttttaatgttcatgacaaaacattttaaacatacagaaaagagagtaagaacagcatatgcgaagctacattagcgaaactacagcaagtttcaaggaataggctttccacccagcctcggatttacccgaaaagatcaggcccctcttaacacgtaaccacagagcctcggccacgctcggaaacgttcaagccactcccagcctgggtgggtatggactgagggttccggtcccccctctgctgcccgaatcttgctcttccagccatctccccatgcgatctgagtgagatccacacacctggctgcctctgtgcctcctgagtctctcatgaccccacacccccgactctctttcttccttgtggtttttgttgaaaacctggtggtttgtccctaaggccaggcccaggacagtcaggggtgccgtaggactcaggttcctaccagggcccaccggggacctgtggtgtctgctccctgacagccgtcagcagccaccatgaatcctgcgagccgccacagtagtcctcaccttggttcgtgagcagggctcccgctctcaggagagccgccctcatcgacgctgggcagccgcagcagacagtccctgtggacagagaggtgggaggctcgactccttctcttcatccacctgttttcaaagcagtgagtgcatccagcgtcctccaacgtggaccagtgagcttggttttatgatcttatgaatttaagattcgcacgtctttgatgggattttgtctgttctgctgattccacctgaagctcagaaggcaccccggtccttgggacgcagctctgctgggctctgacccacttcctggtgtggcaggatgctccagccccttctatggggttcctgccccgaaatctgatcaaccatttgtctgcagagccctggccagtgaggccctgtctgggcccaggcggtcctgggagcccccaggtgcgtgttcacagtgtcctcctgaggcccgggctgtggtggacccaccacgctgagtgctgcagccgcaattcttctttgaaccagtcacctcaagtccactggaattgcttcccagggccacgaagagcctcccagggctgacctggaccctgatccaagaatctccagcagagcagaggaggggcttcctgaagcgagactcgggagagtgtaacccgcttcctaccccctagagaggtggccttttcagtttggagaaaaacttcaaccagtgttgaactgaaaaccacttggcttgaccgcgtttgctcaggaatcgcatctcgtggggaagttttcacgtccacttcacgtgcgtggccaggccctgtccccactcgaggcgagagctaccgggatgcccatcgcgatcgcaggcgccgtgggagctgcaggctttggaccacagagaggcccggagcaggaagctgcaacgtccacctcctcgacccggctccccgtcgccctgtggcctaaggtgtgatcatttcatgcctgatcggcctccctccagcctgttccctccgctgacggccaagcccagccaggcagggccactcggtgctcccaggacagcgtcccaggttttctggcccacaggcttggagagtgggccccaccctcccttcctctgccagacgcctgcccgtggtccagcctcgtcctgctgccctggggcctccgaggtccttgtttcctgagaggagccttccctggcaacatgacccccagggaactcactcaaacggctgctcttcgccggtggctcaaatactgcagcttctgattccagcacagtttctcacagaaatctgtttctccatgtatcgctgtctcctgacccccgcgggcagcacacagttgtgtttccctccttcagggtgcaccatccttcaggtcagaagcttccagaaggcagaaatgctgagctccctgcatcggtgcaaggcaggccccgtatggctctgcacctcgagggccgactgcgtcctctgggctccaaggggcccctcgcccgcggccatgcagagacctggagatgtgaggctccgcggctgcaaggatagcgtctcaggggcaggaggagcccttccttatggtgccagccggagggtgccctccaagttcacaccccagagagtgaggcttcaaacagattaggtctggatatcttaaaattataaaaatattagcagaaacaaaggaaagctgtccctgtagcctcggggtggagaacatcctcctgcaaagctgctgaagataaacaggtcagattccacacatgggcacttagagctcttggatgtgagaagacacacgcacaacgttagaagctggcaacacacacagcaagcgtgtgtgcggcgcccaggctgaggcgagccctgatgcgcaggggcgctcggcagtcctacctcagcggagaaagcatagtccttgcatggggatttagaggaaaaattaaaactgcgagtagatacgaacagatgcttggtctcattcataattacaaaaatgcaaattaactcgacgagtgagtttactctaacagattggcaaagccgcagagactggctgcggctggtgagtaaaccggacggtcatttatcaggagggtttgtcgcagctgtcagaattgtaagtggaggtgacctgggacccagcatcccccttcttggaattgaggctttgcacacctgacatggctgcacagatgccacatggggcacccactgacgtcacacgcggcacccacagacgccacacggggcacccactgacgccacatggggcacccactgacgccacacggggcacccacagatgccacatggggcacccagggaagtgtcggtcatgacagcagaacatgggaagcacccacagcagcatcagagcggaggggacggaccctgtgtgcccaaacatgcatgtcacaggtcccccagggaggcggaccctggcccaggcacgagaggctggcaggtcccccccggatggcacaggagaccccaggagttggcagcagagcagctatcggggctcctggcccaaggtgcaaagtcagagacagtggctggggccggtgccaggcgagccgtgaggggacagggaggtgccaggtcccctaccagaggtgcgtgcacagcagggagtctgtggggatggccagcggccgggggcctggctggtgtgccaggtgggctgccccagggcaccaggcagggtgcaggagggagagggtagaggagaagcagaaaccagcctgcgggggaggcagggccaggcatgggacagagaaggtcagccggggttcctgaccgggaaggagattcacgccatgaaaaagccaggatgcaggcagagtgcagctggggagagagaagagatgcgtgtccagctgtctgtgtgtgctgggtgtgcacgtatgtgtctgcatgtgtgcccgtgtccagaccaggaagccccaggaccgtccacacacacacacacacacacacacaccagactgtggaagtggaaccacctgcgaggcagtttatgccccagagaagaaagtgtggggtgctgggtgcacctggtttcttctctgtgacactttctgtcttgttcaaataagacatctcaggagaaaaaggagtttgaggcagaattggatgagcttggtgatagtggttggagccaggctcaggtggagtcaggggccctgggatctggctgggtccctgcagcctgaccctgagacagaccctgacagagagggggagtcggccaggatgaccagctagcctggggccgcgggatgcagggctttctgtgaagactggatgctccgctggtcaccttggacctcacgacggactggggaggtgggtctcagggttctgtgacgatatcttgagaccacccagggagaggcctggggccagggcagcccaggacacggatgcgcgtccactcagccagcccaggacgcaggtgcatgtccactcagccagcccaggatgcaggtgcgtgtccactcagccagcctggactagagtggacacttgggagcacaggtgcgggggcagagcaggccctgggtcaggtcctggctccacacatgagctgtgtgacctgcgatgtggccccaggcaggttcctgagccgctctgcgttctgcttcctcttgtgggaaaggtgaagccccacaggcagccgtcctgggaagaagtgtccaggcctgaagtgcggccgtgtccagggtggacctcgtgcagagcccaccctctcaggcaagggaggaaaacccagactctcaaacaaaaagaaaaacccatctttccttctactgaaatccagtttttgaggttttgaagtttttgacctaaacactgaaaggccagaggagtctgtgtccctccagaaagcgcagaggggcggggccatggccagcacagatctaggcccaactgcgcgggcggcgagggcgcgggcagtgtgggcgcaggtggtgtgggcgtgggtggcatgggcgcaggcggcaagggcatgggtggcgtgggtgcgagcaatgtgggcacggacggtgtgggcacaggcggtgtgggcacaggcggtgtgggcacaggcggtgtgggcacaggcggcgtgggcacaggcggcaagggcatgggtggcatgggtgcgagcagcatgggcggcgtgggtacaagtgaggagggtgtgggcggcgtgggcacgggcagtgtggacgtgggtggcggcaggggcggcaaaagtgtgggcggtatgggtgtgagcagcgtgggcgcgggcggcgagggtgccagcggcgtgggcgcgggcggcaagggtgtgggcagcgtgggcacgggtgctgcttcccctcaggggaatctcacgattcctgaaacttgagctcctggcccggagaagtgctggccgcggtcggggtggcgcacacgcagagactctggagctgacagcctgtcgtgcccacaggcgcacatctactctctgggggccacgctgaaggccgccctcgagtacgtggcagagcccacactggaacccaggctgagccaagacctcgaggcgctgctgagccggatgcaggcggaggaccccggggaccggccggaccttgaggtaagcgaggctgccctgggccaccccaggctgtgaccctgaccccacaggcctggacaccgtgtgctcaccacacccacgcccagcagcctcacctgggttccgcaaccacagtctcatggcatggcattttgcttaaaggaggacttggttttttattgtccatttttgttatgaaaggttttgcttgtgacaagcctcctggttctctgcaacccagatgtgctgccttttcatactagaaaatgggcaaggcaggcgcaggcaggctctggggactgtccccaggtcaccttcaaaggatccggccgtgtcgggtgggtggctgcgggagatggcccctcctccgagccttcctgtctgaggtgttcccgtccccagagcatcatcgcgctgtgtgaagagaagctgcagctcacatcctcctgtcgcgtgtgccggagcctctctgctgtggggaggagggtcctctccatcgagtccttcggagcgctgcagggtgagttcttgaacccacacacgtgcatcctcatgcacatatacctgtgtgccatgtatgcacacgtgcacatgctgcaaacacacccatgcacacacacacactgcacacacacccatactgcacacacacccatgcacacacatgccacacacacccatgcacacacactgcacacacacctatgcacacacacacctatgcacatgcacacccatgctgcacacacccatgcacacacacccatgcgcacacactgcacacacacgttacacacacccatgcacacacacgctgcacacacacccatgcacacactgcacaacccatgcacacacacctatgcacatgtgctgcacacacgctgcaacacacccatgcacacacacatgctgcgcacacacacgcacacacgcacacacccactcacacattcagagatcacacaaactcacgtattcacacactgacagtcacacacgagtgttcaaatagatcacatgtgcctcgtacacacatattcactcttgctcacagtcacacacatgaaaattcaggcatgcctgttcacactgcacacgcccacaccagaatgcacacattacacacccgctctcatgcctaccacgtccactgcctcacacgtggtcagacacgcaaacatgctggtcctatgcacacacccatttccacactctcatgtgcatcatgttgcctgtgccagccttgcaggcacccacgcaggcagaggtgactcaggctcagcttcagaagtctgtggcattggtgccagtgtggcattggtgccggtgtggcattggtgccaggcatctgggtgttagtctcatgggcatttcaataaacggatgggttgatgtttcacaactgaatttcacctgcccccaccaggagcgccaggtgggtgcgttacagagctgcagctgcagcatctggggcgtttgtggctcacgcatattctggtgtctctcaggccgcctttgaacagaggccgtgtctgcattggcatcgctacctgcagcacggagccccgtggggcctcaggacggtagccagggcacggccacgaggagtctcatggtggccggcagggccctccctgctgaatgagcacgtttgcagctcagggtttgtgctgctgcgggaggggcgcagtgtggagtaggcagtgtgtgcagtgtggagtaggcagtgtgtgcagtgtggagtaggcagtgtgtgcagtgtggaataggcagtgtgtgcagtgtagagtaggcagtgtgtgcagtgtggaataggcagtgtgtgcagtgtagagtaggcagtgtgtacagtgtggagtaggcagtgtgtgcagtgtggagtaggcagtgtgtacagtgtggagtaggcagtgtgtacagtgtggagtaggcagtgtgtgcagtgtggagtaggcagtgtgtgcagtgtggaataggcagtgtgtgcagtgtagagtaggcagtgtgtgcagtgtggagtaggcagtgtgtgcagtgtgaagtaggcagaacagagccacacacagcagagagagatcaacgccgtgtgtgggaggcggccgctgacggccgtagccacatcatccaggttcttcctgtggggactcacctgtgtaatcctcgaggaaaacgacgtgcctttggatgagataattaggtccaggctcccataggaagccccagagggaagccccgcctggcctgggggagaggcagccccagcctctaattagccaggatgacctgatgagtggggcaggagaggaaggcgggagccccctcctgtgagagcctgggttggggtctgtgatcgtgggaggggaggagaggggaggggaggggagaggtgggaggggaggggtgggaggagaggggaggggtgggaggagaggggaggggcgggaggagaggggaggggcgggaggggcacccagccgtgaccacatcttgcttgtgcccagatgtcagcgagagcagctggcgggagagacctgccccaggaaacgctgggcccaggaggccgcccggggaccccagcactgacccggaggttctgccgacccccgaaggcccggagtctgagacgagccggggccccagagcctccccaaccaaggctctgctgtccaccccggtgagaaatggcgagagccacagccgggaggggctggccggcctcgtcctggatgccgagcgcaccctcggggagctggacagagacgccctcaggagaagccgcctgcggaaggtgcagacgttccctaggctgctgtccgacagccccgaggccaccctctgcctgccgctgacccgcgggaaaagccagctgcccatatcggaattattctctccggaccccaggaaggcctttctggacaggaaaaatggcctttctagcttccaggctcagcccaaatgcaggctgtggccggagcaggagccggaacaccagctgggacgggttccctgtgcaggccgcagcacggacaggggccctggggtgcccggcagtccaggacagcccgagacttcacaccccagccaggggccagcagaggcccctgcagaccctcgagatgctagcggtgaagcccagactcccagggacgatgagagaattccagaaggagctaggcagctggaaagtgcagccgcggagcaggtgggtgcctgggtcttgtgtgtgggtggaggggtcggcggtcagtgagtccggggccgggcctctccacagatgcaaacgctttgtttaactcagagaattaaccttcaccctcgctccataattaaagacattttcattgagctgccccgtttctgaaggaagctgtggctgcggctggggatgctgtcacccaggcgtggcctctcgggtagacgtttgcctctggatgacccagaaagcagccgcctcctcagccctgcccggctcctcacacagccccgcacggccgtcccgagggattaattttcttccgggaagcaaggccagcagccccggctccgtgatgtcatttcaggggctccgtgtccccagtcctgatgctcacagccctcctcatcttcctattctgacggtttaaaagttagaaaccaaagctgtgggttgagcttgctcatctgtggggcttggtggtgtcggtgctgggccacctccgctgcctccgcggggacgctgggatctggtgcggctgcccggacgtggcctccacacaggatggggcctccccagcccagtgctgcccctggtcagctgctcctcacgagggatggaggatgctgttggagccagtgttctggggggcctggtccgtcggcccctctgtccagccgaagacgcttgggccaaggcctggccaagtgcattttgccctccttggctcctcagtgagccacccccagctgtgtccccgtgagctcctccgggcaaggtcacctgaagtcagtggcctgcatgcaagtccatctgccaggcagcgcctggcccggggacgggggtgccctcaagccaccaggcctcgttgatctgaaggacaagggcgcagtgccccgtcgccctccaccactctccctggcggcacgccttcccacgcacaacagcctaccttcccgaagggcacacggaggcacagggtggccgagccacctgttggagggtggactttggtcccagctgtccgtgaggccttggagtggagagtggcctcccaggctgaacgcatgcctggtgtcacggtgtgtgtgtatgtgagaaaatgcaccgaacaaaagccaccacttcaaccctctgcaagagcacagctcagcggcattgggtgtgttcacgctgttgcacagctgtccccatcagcccacacgaaaccccaacccccgagcccgccccctgcaccccgtcccgccctccacctccatgagcctggcccctgcaccccgtcccacccttcccctccatgagctctgtccaggggcctcgtgggagtgggatggacagagctgtgtgtctggtctcttcactgagcccactgtcctcacggttcctccccagggagcctgcgtgagaaccccccatccctgtcccgaggccaagcgccatccacactgcccctgcgtccgtccgtggatgcctgggtgctccccgtgttggctatttcgagccgtgctgctgggaacatgggtgtgcacgtatgcgtgagccctgccctcggttcctcggggaatgtggccgtgtggaactgctgtcacctgggaggtgtatgttgagcttttcaaggaacggcagcactgtcgtctgcagtggctgcaccgtgggacgttcccacccacagggccaagggccccagtctccccacggcccccacacgctggagttgacttagggacctccctagcccttctatcaggtgtggggggcgcctactcaggggctgagtgggcctcaccctggcctgtcccccggacatgcctctccaggcggcgggccctggcaaggggtgtccacactgacctcgccgctctcctgcccacagtgggtgtccctgcaggacctcctgtcccagctgggccggcccttccgggagtacgagctgtgggccctgtgcctggcctgcctccgcgcactgcagacacgccctgagcacccaggtgacgcacgcaccatcccatcccccccgccgtccccaccccccactgctgttccaccccccaccgccgtcccacacccccgccgtcccaccccccacaccgtcccacgcccccccactgtcccatcacccctgccgtcccatgcgtaactggcccccacctgaaccaagggacccaggggcagccaggacagtgtctccggtgaacggaacaggcggctcccgtctggagcaccttgtgggtgcctgctgggttgcagcaccgagggaggtgtggggacagatgcctgcaaggtgggccttgaaaccggtgactgtgccgtaaagaggaacggggactttgccatggccctcgcccacacattctcaacacagtgacattgtccccagggaggcagcaattggctttggagtggggagggaatcttcagcattgcacgggtctgccccgtcaaagcctagccctgccagacatcagggcagacggacggtgcatctgagacgtaaaaacgtcctgggggtgatgagggcagcatctgaaagggctgggggagaggccatcggagacacacccggctccagtgtccgtccaccgtgagcccgtggctgccccgtgggccctgactcgggacggggcctgtgacacgggggcttcaagttaccgtgttctccctgccgcttggctccctttcagccgcagatatgccgctgcagccactgtgtcggctggggcagcgctaccctcggggagggctgggaggaggcagctccgaggaccccgggggctggggtcaggccatgtgcgtgcactggcaggtgcgtgcccgtgcaatggggaggctggggggctgcccggcctgactgaggctccgcagctccttccccccagccagccccaagtgcggggcagcatgcatacccgccctgacccaagctctgccacagcctacctgtgtctggactccgtgctggttgctgaggacggggctgtgctcttccagccaccccctgccaacggtgagtgtgtgggttcccctcaggccgagtccagcaccggctcgccaggggtgaggaaagctcagtcgggtttctctcttaggttcctatgactcgttctttctggctcccgagctggcagaggagaggctggtaactgaaaaggtacccgggccctccccaccctgccccagccctgcccccagccctcggggatgccacgtcccccatctgtccagcagccccccatcaggactcgagggagtcagggcagcccttcctggccaggcggccacaggcggtatctgccagcagggccgtggctctggccggggcaccaagacagggcttggtgtggacggcactggccatgtgcactagagctgcgcctcctggctcacgagaactaagggctaaacaaccagggatgtgtataaggcacctgtgaaacatgagcattcttaaaatttaaattacacaaatttaaatacaattcaataaattacattcaaaatcaaggtaaaacttccactcaggaatgatagaaatgtgtacttcccgctcctcccaccgaggaagagcactaagtaccctacactaagcaccctgcactaaacaaacaccctgcaataagcaccctgcgctaaccaccctgcattaaacaccctgcagtaagcaccctgcactaaacaccctgcactaagcaccctgcactaaacaaacaccctgcactaaacaccctgcagtaagcaccctgcactaagcaccctgcagtaagcaccctgcacactgtgcaaaaaacaagcaccaggccacctgcagggggaggagacggcagccggcgaggggcctctggaccaaggaacaaggcagccgtgagtgccctgggttttccttctgcctcacatattgagacttggaggtaaagaagccggtgaccgggaaaaagcaatgggcgcacactaaaagccgcgctttttcatcttctggggatgttgtctagagaaactcggaatggtccaccatttgccaaaccatcgaaggctttcctgcagtctagcctgtaacgaaaagaggctgtcctgaaccccagcaatagatcgttcacctttacaccaagaaggctgggaaagcactgtcatctgcaggtggcccaggccgacctcagggggttggtgctgtgagacctgaagctcttatgagattgtctcaaacaaaaaccgcgtccgtgaggctgcagtggctctgtgtgcactgtgtgtgttcctgtgggatcccttcagggttagtgctttccccttcaaggaacgaaaatcgctgggaaagtgctgaggcacaagcacagagtcagaaaactaagaaaaaatgaagctttttggagtaataaaaaagagtttaagccccaactggccgggcatggtgactcacgcctgtaattccagcaatttgggaggccaaggcgggcagatcacttgagtccaggagttcgagaccagcctgggcaacatggcgaaaccccatctctactaaaaatacaaaaattagccgggtgtggtggcacgtgcctgtaatcccagccaggtgtggtggcacatgcctgtaatcccagccaggtgtggtggcgcatgcctgtaatcccagctactcgggaggctgaggtgggaggattgtttgaacccaggaggttgcagtgagccaagatcatgctactacactccagcctggatgacagagccagaccctgtctcaaaaaataaataccccaacagggccgggtgtggtggctcacacctgtaatcccagcactttgggaggccaaggcaggtcgatcacctgacgttaggagtttgagaccaccctcgccaacatggtgaaacctcatctctactaaaaatacaaaaattagccaggggtggtggtgtgcacctataatcccagctacttgggaggctgaagcaggagaattgcttgaacccaggaggcagaggttgcagtgagcaaagatggtaccactgcactccagcctggttgacagagtgagactcagtctcaaaaaaataagtaaaacaaatgccccaacaaaagcctgggtctgtaatcagaggaccagggaggaccaggatgcatttacaccccctgctctgcaccaaccaaaccccacaggagcactgcggccccgcccagcaagggccgagcctggagcctggactcatctttgtgagactgcagagaagtgtccagtgcctgccctggccccaggtggcctcaaagaaagtgagcaggagccaggaccttccttccctgcagcgtgtcctgcaaggacaactggaaatcatggctgaaaggaattggagaccacaccagcaagtggaaacacatcccatgctcacagatgggcaggatcagtgttggtaaaacagctacactgcccaaagcaatccgcagagtcaatgctattgttatcaaactaccaatgtcatttttcacagaattagaggaaactattctaaaattcatatggaaccaaaaaagagctgaaatagccaaagcaattttaagtgaaaagaacaaagccagaggcatcacgttacccaacttcaaactatactacaaggccacagtaacccaaacagcatggcactggtacaaaaacacatagaccaatggaagagaatagagagcccagaaataaggctgcacgcctacaatcatctgatctttgacagagctgacaaaatcaagcaatggggaaggactcatgataccaagaatcaggaagatgtcaaactgaatgaaaacaggcaaccaatgataccaacctggagatgacagaaattttaaaagtgactttaaaatttttaaagcaaccatcataaaaatgcgtcattgggcaattgcaaacacgcttgaaacaaatgaaaaagtttcagcaaagaaatacaaagtttcaaccaaggaatagaaaagaaaaagaaaaagctaatggaaattttagagctgattttttaaaaaaactcaatgaatgggcttaatagcagaatagagagggcagaggaaagaattggtgaaatggagacaatagaaattacacagtttggacaacaaagagaaaatagaccaaaagaactgaacagagcctgagaagcttgtgggactataataaaagatctaatatccatgtcatcaaaatcctggaaagagaagagaaggagggtggtgcataaaaagtactcaaagaaataatggctgaaaacttccaaattttggcaagacacataagcctacagatttcagaaggtgagaaaaccccaaacatgatcaatgcaaagaaatccacaccaggacacatcatagtcaaacctctgaatactaaccctcccctctccgaaaaaataaaaataaaaataaaaaacaaaaagagagagaaacagcagcttacatatatacacatatggggggggaaaacagttcagatgatcagatttctcatcagtaactgtagaggaagtgcatagcatttttttaagttctgaaagaactttcaacccagaaacctatttccagcaaaaatatccttcagaaattaaggaaacaggctaggtgcagtggctcaggcctgtaatcccaacactttgggaggctgaggcaggtggatcacctgaggtcaggagtttgagaccagcctggccaagatgacgaaaccctgtatctactaaaaatacaaaaatttgccaggcatggtggtgggtgcctgtaatcccagctacttgggaggctgaggcagaagaatcactggaatctgggaggtggaggctgcagtgagcccagatacagccattgcactccagccagggcgacaagagcgagaccctgtctcttaaataaataaaggaggaagaaggaagaaagaaggaaggaagaagaacaagaagaaggaaaaaggagaaggaaggaggaagagaagaagaaaggaagaagattgacagagtaatgtttagaaacatgacctaaccatgtactgtctaccagaaactcacttcaaataaaacaatataagtaggttgaaagttaaaagagttgaaaaagatacattatgaaaatgataaaaagaaagcagaagtgactgcattaatatcaggttaagtgtacttcagagcaaagaaaattaccagagataaagagggacattctataacaataaagggtcagtccgcccagaagacatagcaatcctaaacatatatgcaccaaataacagagctgcagaatatgtgaagcaaaactgatagaattaatagagacacagatgaatccacaattatagttggagatgccagtttcccctctctgaacacttgatagaacaatcagactgtaaaccagtaaaaatatgaaggaactcaacaacactgtcaatcaacacggctggatcaacatttaaaggacactccacccaacaacagcagaatccacattcttctcagttgccccactgactatacaccaagctagaccaaatcctgagccataacgcaaacctcaacaaatttaaaagaatttaagtcatacaaatgtgttctctgaccacagtaacaaaaataaaagggaaattttccaaacacttggaaacgaaacaacacattctaaatactctatgtgtcaaagagaaaatttcaaggaaattttaaaaacatatagaactgagtgaaaatgaaaatgcaacatatggcgaaccaggatttttgtgccaatggcgatgtgctggctgagatactggactatatcagtatcagtattttgcaagctgctactgttgtggaaactgggtacaaagtacatgagctctattatttattaaaactatgtacaattatcacaaaataaaaggttaattttttaaaagtgtaacaagtgctcaaaatgggtgatttcctacttatctgactctagttggctgttctatgctcgtggggctgtctgcgtctgctgtgcctggatgggggagactctgtaaaggggagctgcctcttcccagctccacactcaagggcactgcattggtagccagaagtcagccacgtgggagtacttacaccagggaaagcagcaaacgctacaaatgtcttgttctgttgactctctggacttactgaagtgatggagaacacgtggatgatgtgattaaacttaaaagtgtgtcatgtctgtggccgctcccttgagaatagcccaaaaggtggaggacatggtcttacgatatcaaccgcgaccatctgattcagcaaagacgtcgctcagaggggtgccccgaattccagcatgggtctgtccggcttcacttccatctcatttactgaaatgaatgaaaacatcaaccaacactcatgtcagcagcactcgtgtattgtggtggactgtggatgaacatgggtttcattgatttttatcaatgaaagccttcagtgagaattgactggctctgtggaacttacaaaacgtgcatcaaatggtgtgctgtgcatcccttacatcagcaacgtgccggatgaactcagtttgcacacaggcggtgtgttcgctcggagagccagttgttagccatgtagcagcacggcaccagtcggggggcttccgggagcaggcaccagtcggggggctcccgggtccgtgaggtgggggctatgctggccagttctcctcaaaccctcgagctgctgccttcgtgaggagagtggaaggtgggaaagtccagttgaggcttccaaccctctggtgtttaaaacgcggacagaaccatgggggagagttcgacctgcaggttcctggaccacgacctggaggcggatgcaggggtccagggtggggcctgatagatgctgaggaggggtcttgaggagagcccctctgtgggggcagtgcctgggtgcccctcagggtgcctgaggtgggcaggtctgctgggcacagcagcccacagccctgcggtagacactattctctccccacccgcccaggcctctgtgtactgtgtggccgccgttctgtggaccgcagccaagttcagcgtcccccgcaaccacaagctggccctgccacgcaggctcaagaccctcctcctggacatggccaggcgcagtgccccggagcggccgtccgcggctgaggccatcaaggtaaccacaccacagtcatggccccagcccagggtccaaggactgtgggcagtggccgccctcgctgagctgggggtggaggagcacgggctgccagtgtccaggtgatgaggccaccaggtctgtttctaggtccctgtttctagacgtcggcctggccgtcgcatggggaagggagtgggtttcgcgtcatggccacgtccatgtgggtggacagcatgggggtctctgctgctccccaccatggccgttcctcctgcggagcccgctctctccagcttgtccaagaggccagggcgggggcaaggggtgtcctgtgggcacgtgcagacccctgctcttaggccctgctggaggggagcagagagaggcctccacacctcaccccccaccccgaacccccacctcctctgaggatcccaccagccccgcccctccctgcctggtctccctgctggactcaagctttggggctgggttctaacgtactcctgctgggacctgcacccgcacccggcatggggaccagcgggtggaccagcaggtggggcaggagccaaactctcatgtgtcagtgatcaggaggacctcctggggaggagccgagctgggtgtgggtgatcaggaggacctcctggggaggagccgtgtctgggggagcggagacggccatggggttggggacctgggtccagccgtctccgcctcgactgctctgtggtcttgggcgggttgctcagaccctgtgggcctctcaggcctcctctgctgcaggaggatgagatctagacacggctgggcgtctgccaagcagtgaaagcagattttattcagtaactactgagagctggggaagctgagctcagttcccatgtgcacaaggcctgagcttataaagggaggacaggagtggccgggggcagggagcgtggggctcaggcgaacgtgaccaagggctgccagtgtccaggcgacgaggctaccaggtctgtggccaacgctgggtttgggattctgccctcccagggagcctgggggacagtggccgactgtgagcccttttcaggaaatgctctaagaaaggcttgtccggggcctgtagttgggtgtcggtgagaacaaacaggaaaccctcctggcagccctgagctttttcagatggggacccagtgacacggggacggtgcagccgtggctgaggcctgtcgggacgtgtgaactgtctcctccctccaggtgtgcggcagctacctcctccagcgaggcatggacagccggaaaatccttgcccacctcagagcttccatctgccaggtgggctagaacagccaggccgccgcctcctccgccgcgcttagcttcctccctcctggacgcacttgcccttgcctggccgctcccggcagccccacaccccggtctctgttgaccaccgagctgtgggtgggtgcatctgggggtgcagggggacactcgagtcccatctaaaggccccacagtggcccccagggacccagatcaggatcagggcagggtcccaaggacggcggcccagcacccaccccgggcgcagagagctttgggagtgtgggccctgagtctcgggtggtgctggcgtctcccactccctggaacccacggaaacctggttggcttgggaggcaaaggagccccaacggctccctctccaggcagagccgctgcagagcttgggccgtgtggccgccatgcccggctcctccccagcaggaagctccacggcaccggcgggtggtgggggacgccctgtgggtgttgccggcgctggcggagctccgtggtcacctggcccagggctgtcacctcctccccaggtgtaccaggaggaagagaccatcagcctccaaaacgccttctcagtggttgaactgaagcccagtgtggcaccagccccagagcccagcccaggtggggacctgaccagcccctgctgccccaccagctcctgcacctgacaccacagctgcccccacctctgcatggacagacacagccgggcacctctcggaaacccgggaagcaagtccagagctcggccaacgtggcccatgcagcccagcctgcctgcccctgccagcccccatctcccaaaactcccagtcgctcaggccccagctccaggttctcactcccatctcccagcagctggccctcccaagcccacatctggagacccccagagtccacacagagcccaccccacccccgtactgagccctgctcagcaggcccctccaaggcttctggtggggcctggtcttgctggcccgtccccgcctgctggccctcccccaagcaccagtctcacccaccctcccattccagggcccagcacagaggaagcccccagggccatgcgggaggggacgcggcaccacgcactgggtgggatgagcactgggtgggatgagccggtggtgcggcacgtgctggggccactccgcccgcccacaccctcagccccctggctccccaggcttcctgccggtgaacagcgacaccgggcttgtggctgtgccagggcccgtgcccggccagcacccctgcggtgaagaagccacccagctgcctgcagcgttcacctccgaggccacgcacttcaagcccattgtcctcgcgcagaacgcaagtgtggccaggtgagcatcgtccccacaccccggagctgctgggtcccgggcgcaggcagcccctcctgagctctgctcctcccgtagggaccagcctgccttggcccaggaggagtccgaggagaggggcggccagagggagggagaaggtgaggagaagctctccctggaggcccacgctgggtcccccagcctgaagacgcctgacgggccggtgcctggtccggggccacagggagcagccccagagcctcttggggcgtcagtgcagcgtgactcagcccagggccgcccctgccctccaccccaggccccagcaaaccagccagagggggcctcatcggcagctcccggctctccagtccccgccccgcccacgaaggcatctgcgctgcccgtagagcaagggccggctgagccgatcccacctggagttgcttccgggggcctcaggcccgacgccctggggcccaccacggcccaccacggcccacgccacccgcccaagcccccacgaagcaaggccaccgagcgcccgggccaggagccagagggccccggggccacccctgccggggaacgtgatgaccagagtccagacagtgtcccagagaggccgcggcccgcagaccggaggctctgtctgccctgcgtggatgcctcgccactcccagggaggacggcctgcccgtcgctgcaggaggccacgcgcctcatccaggaggaatttgccttcgatggctacctggacaatgggctggaggctctgatcatgggtacgtgggggccgcagacgccccagaggaggcccgggccagggagagccccacaggggactcggggccgccccacgcccttcccccagccccccagccgagatcagccttgtccgtttcatcagccacaagggaaccagatgagcagccctgccaccatctcacttgtctccatcgttttgcaaaaccaggggagtacatcttcgccttgaaagatctcacctttgccactttctgtggcgccatttccgagaagttctgtgacctgtactgggatgagaagttgctgcagaacctctttaaggtggtcaacgggcaggcgtcaccctccccaaggtgggtgcccagttcggccctgcattcccgcccctccctgatgcccactgtgcctgggctctgctgcctgacccgggcccagccttcccctcccaaccctccgcttccatctcgctgctgtctccagaggggctacccttggtggagatgggtgggggtcccagcagcccctccttgggcctgacgcctactcacagctttcccatcggacctgggtttcttctggaggacgaaagggctttcagagaatatgaggcaggggctctccgggaggctgcagggggcctgggcagtgatggccacagggctccctgctcagagggaccagtgtgagggccccaaggaggtgaagagactcccaaacaggtggccccagaccccacagggcccagcactgagctgtgttgggtggggcggcggccaccccacattgccttgctcacagctccacgcggtgccagcagcccgggcagctcctccgcgtgcgtgtggagtaaacacagctgtgagcaagggcacccaccccagccccggcctcctcggccccgcagcactgagaggctgctcccgagtccccccagggaccccaagcagtgaatgacccagggatcccgtcggctgctgtgccccttagtgactgagaggggtgagctcctgccgcctccagcgagagctccgcatagacgtgtgggcctgtgggccccgccctgtggagactgtggcctcctcccagtgggcggaggtggggactgacctgcattctcgtcgtcagcacggccgaggaggctgggtcacagctcgagggcagccaaagcccccgctccccgtccagcaagaggccgtcgctgcaccgcctgggtaagtgctgggcgggccccgcggcaggagctctgctgggcggctcctctgtgctctctgcaatgcggggggcgccccagggtcccagcagcctcagactgcactgctccagcggggctgcctttgccccgggggtgcccagccaaaggccgccctctcctgggggtgcccagccaaaggccgccctctcctgggggtgcccagccaaaggccgtcctctcctgggggtgcccagccaaaggccgtcctcttctgggggcgagcaggagcccaggaccttggaggtggggggtcctctgtcaccggccactgggacagtgggagccgccgggagccaggtgggatccgctctccaagcagaggggggcctgtgagccggggctttggtgacaaggcagaagtgggcttgttagccccaggatcccagggcacatgagtgccaggctggggacgtcccagcgtccagccagcaggcttggtgttagggacaaggtgggggtggtggtcaccctcaggctgtccgtagtcgtggccaggcttggtgacgggcccagttcctatcaagtcggagaccaggcgggcaggctggggcatgaggcccgtgcactcctggatggcaggaaagccctgcacaggggaagctcccgcagggacagagctggggaccactttttaaattccagaagaaaagaggagagcgtgagggggcagagggacacagtcctgatagcagagccagcgaggacagggcccggccccaccccggggcgagtacgagtttggaagcagtgagggcgcagagtggggctccatctggggagaggcctctctctgtcacccggccccgtgcggcagttcagggtcccagcatctcccctgcactgggaggcggcagccgtgcccggggggcgcccgtggtgggcgggtgcaagagagaagggcgtcgggtgtgcaagcaccaccggcctcccattaacagcctgcccgggctccgcccacaggagccactgtccacgtaacctgcgtctctttctttcaaggaaaagagaagccagccatggccaggaccagcagcagggccccctgctcacccacctcggtgtcggatgtggactcggacgcactgtcacggggaaacttcgaggtggggtttcggcctcagaggtccgtaaaagccgagagagcgcagcagcctgaggctggcgaggacagacggccagctggcggggcctcagacgtggaggcagtgacccgactggccaggtccaaaggggtcggcccagccttgtcccccggcccagccggattccagagctgcagccccggctggtgcagcgccttctacgaggccgactgcttcggggccgacgtccacaactacgtgaaggacctggggcggcagcaggcggacggggccctgcccgacgcccagagcccggtgagtcccaggccttggcactgccgggtggggcagggcgtctccttccagcagagcttcctggtcactgcaggtgacagatggcaccgtgtgcccagagcccccaacagggtgacactggtcctggtgcccccaccccgtggctgtcaagatggtcagggccccctccctgggctgagctccacgtctagggacaggctcgtctgcactggtgctcctggtggctccacgtctgaggacagggaagggcttttctctcatggtcgcccgggcgatgggttcacaggaggcccctccatgctcgtgaccaggttgcgttcggtcgtgttttccgtggggcaggcacagcctccgggcccttgggcagcctcgctctgcagtgaaagaaaacaccaaaaacgcctgcccagcaagtctagactgggcctggtcgctgcagcctggtccgggctttctggccagcagtgccatcctgggtcaggagcagctgcaactcctccctggccagcagggagaggaggtcttagaccggggagtcctgggtgcaggagaggcctgcagagctctggacgcaaggtgggaccagtgacccacagccccgacctgggctgcattctcgagagccccgggactccagggtggatgacaggaggggcccagtggccatcagctccgggaacctctcctaccaccgtctgcctcgagctgagccaccgtgggaagcctcccccagcctctgggcatcggagcccttcctggggctcctccttgctcctctcctgccgcctcctggcctgcactttatgactcagtccagaacatgacccggtgtcccttcagggcaggtgaggggacaggggttaagctctgtgaagccttcacttcatttcagcttctgggccacgtgaaagacccgcatggtgctacagcctctgcacctgcatctcggacaccccacacagggcctgagggggcttcgaggacgcaaaggccgcccccggggctggggagagaaaagggcggccggcacagcaaacaccaaacgacccggcccccaaacgcagggagtccagcagggagcactcagcccccaaactcacggcgtccagccgggagcactccgcccccaaacgcatggcgtccagcggggagcactcggcccccaaactggcagagtccagcggggagcactccacccccaaacgcacggcgtccagcggggagcactcggcccccaaacgcacggcgtccagcggggagcactcggcccccaaacgcacagagtccagcggggagcactcggcccccaaacgcacggcgtccagtggggagcactcggcccccaaacgcacagagtccagcggggagcactcggcccccaaactcacggcgtccagcggggagcactcggcccccaaactcatggtgtccagcagggagcactcggcccccaaacacacagcgtccggcccatggccacagcctcacgtttctcttggaggagctactgtgtctctttcaaaacaggaggctcagaaacacagcaagggcaaaaaccacctggagacagactttcacatccgcagcccaaaacgcacacggtgcagcgagggccgttctctggggcggctggagcagccggtgggcatttcctcccttcagcgctgacccccacctactggtgccggccgtgtgtgctgggctcagcactgcgggtgccctggggctgtggagctggcatccgcgtctcctgctgttaaaacaagcgtggctcccagagtcagcgtggacagcactggtgtgggttcctcccccgtctgtctgcaccggtgaagcctggcctcgtgtttccctcctcactgccccacatgtggtgtggattttagttaccgtggatttattaaaatcagtcaagaccgtcctcctcatggagtccgcctgtggttcccgcgtgaggagcgcccccgacggacatcgagtctgactgtgaacggaggccgtggaggtgccggccagagaggagtctgcgtgagctgcactccagccaggcgggcatcgggctcgcaggcacccgcctccaggttcctggatgcgtcagggtacacagacctttcccaggagattttctcgacatcagcacctctgcaaatggatgggggtgagagggctggatggagcctggcgccggtgacctccgggggccggacgagggccccatggtgcaggccatgggggaacgtggccaccaccatcctcagaagccaggaccaggtgccccggcagcagaacacagctccatggggacacctgcgtttaccaacctcaacctgcccagcccggtaggtccttccttgatgatggaatgttctagacgctgtccaccgggtagccaacagccacgtgtggctactgagctctggaaacatggcccacgtgactgaggacctgatgttttaatttcactgcactttaggcagccacggcagcctgcagctcagtgtgggaggcagggtcgcacttggctgggtggcagcggggtccggagggcttggggaacctggcttagtggccgaggttctgcagaggcctggtctttacgcagctgggacactgcccacactgccgtagcggggagcctggccctccgtggcaccgccacggccgctgctgaacccgtgcgtgggagaagacagcacagggaccccgtctccatggaaccaccagatagagcggattcaagtagttaaatagaaatgtcgcctgcatttttttattttgcaaaaaacattcaaaaataaaccctgtcaatagcagagtcactggcggctgacaaggcgagggggtggctgtgtggatctgagccaaccgcacttcacaaaaggaagcctggtggaccggctcgcggatgagcccctcggggcggtcgcttcgggccctgggcacgtgaacccctcacaggaggctgcgggccgagggctgccgcgcctctcacctctgcccccagccaggtgcccctgccccgtggcacctcacagtccccctgaagacctgctgctcaaggcccagctcccatggacccccaagacttcccagacccctcaccccagaaccaccaccctcctcacccccagaatcaccaccctcctcagtactgggccaagccccacgggtgcaggaggaggctgtatctgcccctgtacccctagagggaagggccgtctctggggtcactgccctggcagcccatcctcagggcgcccctcctccagcctctacgcccgtgtgcctgtcccgtaggacagaaggagtgctcagacgagggctgcccggccaggcgtgggaggcatcctgggacaacgcggcgccctctccctgaatgtagagtcccgtccagggaggcgctcagccccagctgctgtctgtgcatgaagcagtgcccggcggccctcgcccccagctcctgtgatcaggacctgcccgtctggcctcagtcctgcttccctcatggcgacagccctggggatgaggtccccggctccatctcgcaggcaggaactcagactctgggcaggttccggagaatcacacccgggcgtgcactcacatttacactcaacgctcatgctctatggagcacccaagggctggggcaaacgctgcggccgccgcccagcaaaccacgatggtccagccagtgggttcccgggaggagggtttttgggggcctcgtctgcacaggccagctggaatccgcatcattgggcttctttaagtttaaaagaaaggcaaggctggtgcagtggctcacgcctgtaatcccagcactttgggaggctgagatgggagaaatgcttgaacccagggagttggaggttgcagtgagttgtgatcgcgccactgcactcccacctgggcagcagagcgaatcgggccaccgcactccagcccgagtgacagcaagacctcatctcaaaaaataaaaaataaaataaaattaaaaagtcaataaaaataaaaaacggccaggcgtggtggctcacacctgtaatcccggcactctgggaggccgaggcgggcagatcacctgaggtcgggagttcaagaccagcctgaccaacatggagaaaccccatctctaccaaaaatacaaaattagccgggcatggtggtgcatgcctgtaatcccagctactcgggaggctgaggcaggagaatcgcttgaacctgggaggcagaggttgtggtgagctgagatggtgccattgcactccagcctgggcaacaagagaaaaaccccatctcaaaaataataactaaattaaaaaataaaaaataaaaaggcagacacctgaagacacacgggatgcacgttggggaggtcccgctgccaccccctgcccccagccccgcccacaatgtgcacttgggggcccagaggtggcacagccctgcctgcttgggcaggagggcctggtgctgacttggtggggcctggttcccctgagcatcccccacaagggcctgactgtgggtgaggggcgcagggagcagtcggccccaagctgggcactgccctgtgagcctgggggcagcccagggccccccagaccacactgcccaggccggggctggcctcgctggctgagtgggcctctgtctccatgggaccctgccctgcagctgatctccaaggccaaggaggccccagtggggtggggcctggccctggatgtggctgacgtgtgttggggctgcctggggcttaggcgctgtgtttcgtccccaggagctggaacagcagctcatgatggagaaaagaaactaccgcaagaccctgaagttctaccagaaactcttacagaaggaaaagaggaacaaaggtaaggcccctgtgggcacaggtccgagaccctggctgcaggcagcccggcccccacccactctgctccacccacaggttccgacgtcaagaccatgctgtccaagctgaaagggcagctagaagaaatgaaatccagggtgcaattcctcagcttggtcaagaagtatctgcaggcaagtgggctccgggccccgctctgccccgtgaggcagtagcttcagacgggcctcccactgttggatgctgtaaatctgtccgtgtgaagttataaaaggggccctgatttgagggtccaatgccaggaagccctggggcgaggggcagagtgaccaagcgcccgtgtcccgctccggcaggtcatgtacgcggaacgctggggcctggagccctgcaccctcccagtgatcgtgaacatcgcggccgcaccctgcgacacgctggacttcagccccctggacgagtcctcctcgctcatcttctacaacgtcaacaagcacccgggcggccggcagaaggcccgcatcctgcaggccggcacgccgctggggctcatggcctacctgtactccaggtgcgttgggagaaaagctcacccggaaaaggagacgtagcccggggtgctgagaagagggggggaacgtgccctcgccagtcagctaggctgggtttgcactttttagtttagagaaatgtttaatcggggtttaggccaatgtgcactaggtgccaccggcagctttgcagagccctggccagagtggcctccgccgcctgtgggcctgggcaccaggtctcagggtgcgcctggtggtccccggaggtgctgcggaaccgccctacataattaacacacggaatggcttccaaaaataacacgcacaggcagctcggcgatgtggcctggactccatccaactcaccgagtcagaacacccggggtaattagctccagggacgggtgaggctggggtgtttctgcagccccctccactcggtgtgcacactggctcaggagacccctgatccgtaaacgctggtgtgcgtacgtacgcctgcagcagggaggagccgccgggcccactcacctccaccagggccacagggccagacccccggccgccccaccagcccccttggcccttcacccactctggcctgcatgggcccctgggctgcaccctgttctcaggcactgggagctgcagcaggctctggacccactggtctgaccagctcccagagaggccaccctgccagtgactggggccaaccccatgttggcttatgggacccttatgacaccaccttggagccccaagggtcctctctgagcagaggccatggggcccagcaaaggacgccaaggaggacagcagggagccagggctctcagcagccagtggggacaggcaggcccccagagagggatggtggccacccccaaccccgttaccccaaggaccctctagagagggacgtggcccccccaaccccgttaccccaaggaccctctagagagggacgtggccccccaaccccgttaccccaaggaccctctagagagggacgtggcccccccaaccccgttaccccaaggaccctctagagagggacgtggccccccaaccccgttaccccaaggaccctctagagagggatgtggcccccccaaccccgttaccccaaggaccctctagagagggacgtgggcccccaaccccgttaccccaaggaccctctagagagggacgtggcccccccaaccccgttaccccaaggaccctctagagagggacgtggccccacctccgaccccgttctcccaaggtgagctgcccctggtcacatggggccacctactagccaggggtccaggctgaccctcggacctagttctcagcctcctcaactgcaagacagacacagcccacgcccaccgcagggtctctgtgccgttgcgggagacgtccgtgtgcgtgactgggcacgtgtgcagtgtggtgcgttcttggtgtgtgtgcatgtgtggtgtgtccgggtaatgtgtgatgtgctttgttgtgcatgtgtagtacacaaatgtgatgtgtatttaggcttgtatggagtgtgtgatgtgtgtggtgtgtgtatgtgctgatgggatactgtctggcatgtaagcacacgcatgtgtggcgtggggtataatgtgacatgtgtgcacgtgtgtggtgtgtggttgtgggatatcgtgtggtgtagtaggtacgtgtgcggttgtgaggtatagtgtgatgtgtgtgcatgtgtggggtgatgtgtggcttgcgtgcccatgtatggtgtgtgatgtggagtattgtgtggcgtgtgtggtgtgtggttgggtattgcgtggcaggtgtgcatgtgtgtatggcatggggtgtagtgtggcgtgtacacgtgtgtggttgggttttgtgtggtgcgtatgcacatgtgtggtgtgtggtatgcggtagtgtgtgtgtggtgtgtggagtatagtgtgtgtggtgtggggtacagtgtgtgtgtgcacgtgtgtgctgtgcggtgtggggtatagtgtgtgcacatgtggtgtgaggtatagtgtggcatgtgtgcacatgtgtgatctgtggtgtgtggcgggtatagtgtgtgtgtgcacgtatgtgtggtgtggggtatagtgtggcttgtgtgcgcgtgtgtggtgtgcgcgtctggttgtggagttctgtgtggctttgtgcatgtgtgtggtgtgcgcgtctggttgtcgagttctgtgtggctttgtccacgtgtgtggcgtgcgtgtctgtggttgtacagtttgtggcttgcatggcgtgagtgtgagtgctgtgcttccatggaaggagcgtctcctggccgtgatgtggtcacgaggggcttccccgctctgtggacctggtgggcgtcacctttgcagggcagcctggggctggggctgtggccacctgtgtcctcggaccccaggtgagtgggtgaccaggccccttgttccagggccacgccatctcctgcctgagactcctccagggtgggaggaggccttgccaggcctccgcttcctgaccgtggccgtcgggctcccaggacagtcccagacctgcaggcggggccctggtcagtgtctcctgagggtggcgcggtttcacccagtgaagacccagaacctttgagcgtgcagcattgcgcccggtcccgaggcaccagctccctcagcttcccgagctaacgggtcctgcgagtggagacgtcacaaagccctgcatagggctgcgttcagaaaggccctggtgttcagcagggcacggtggctcacgcctgtcattccagcactttgggtggccgaggcaggcagatcacctgaggtcaggagttcgagaccagcctgggaaacatggtgaaaccccatctctactaaaacacaaaaatcagccgggcatggtaggcgcctgtagtcccagctattcgggaggctgaggcaggaaaattgcttgaacctgggaggcggagatcacaccattgcactccagcctgggcgacaagagcgaaactctgccaaaaaaaaaaaaaaaaaaaaaaaaaggccctggtgctggaaggctggaagtagttgggaatttcaaatgaaatttgaaatttgagggttatccatgtcccccctttaatttctccggggattctcctgacagtgatactcaaagaaaacgcacacacacatacagtcacaccccaccaccgaacactagccgagccctggggtgcggccaccccaccacctcaccgccgcccgccccgccccacagtgatgccttcctggagggttatgtgcagcaattcctctacaccttccgctacttctgcacaccccacgacttcctgcacttcctcctcgaccgcatcaacagcacgctgaccaggtaccaagctccacagctccacgcccgccagagcttccccctggggcagggtgggcgcccatgggcctggtttagccaccatgaagaacgaggtggtccctggcgacccaagggggtgaggggccagggaagcctggctggaggtccggctggaggtggaggacacacagggatgcggagaaagcagctggggcaggagggcggtggcctgggcacctgggagctctgggaggggacctgggggagtcggggtctcttcctgctgacctgggaggaaagcggagggcaggtgggcaggcagtgagagccagaaggtcagctgggggaaggggaagcaccaagcagagggtcctaccggccgccagcctccctcggtacccatggccagcacctggtgtcaggagaggggtggtgggctgaggggggaggggctctgcctctctctgggctgatctgctgcccccccaggacactccacgcacccccttgcccccacacgcccaggctgggcacctccctggcacctcagctcctgcctcgggggagggacccacggaagacccccagccccctaagccccctgcacacatggagcctggtcccaccctgcctctctgggagagccacatgcaagcccctgggcctctgcccccgactcccacatcctggcagctcagcagctcccctgcgtctccagggcccaccaggaccccacctcgaccttcaccaagatctacaggcggagcctctgcgtcctgcaggcctgggtggaggactgctacgctgtggacttccctcggaacagcgggctgctggggaagctagaggacttcatctcctccaaggtgacagtggcgctgagctgggcggccgcacccggggctcccacagtgggaggtgccgccctcctccagaaggtggcagtgacccccccaccactgtgcttctgcctagatcctacccctggacggctctgccaagcacctgctgggcctcctggaggtgggcatggaccggcgggccgagggcaaccctcgcggcacagacctggagaaccccagggaggccgaggaggatgccagacccttcaacgccctctgtaagaggctctcagaggacggcatctccaggaaggtggggtcctttctcaggggaggtcctccctggacaggcggatgtgggtccctgagcccagcctcaaagacacaactggtgcatgcacacacatacacacaagtgcaaatgggcacagctgtatacatgcatacacatagacgtgtgcacatacacttgtgtgcacatacatacctgtgcacatcacacacatccacacgtgcacatatgcatgcaccttcacacaatccacacgtgcacatgcgtgcacactcaatccacacgtgcacacgcacgtgcaccttcacacagccatacatgcactcgtgtgcaccctcacacatatccacacctacacgtgtgcaccctcacacatatccacacctacacgtgtgcaccctcacgcaatccacacatgcacacacgtgcacccgcacacgcatccacacacacacgcatgcaccctcacatccacacgtgcacactcacataccccctccatgttcccggtcccaggcagccctgctgcgctggcacctcctgcaccatcccgggtgctcaggggaggagggtcctgctgtgactcattgacccacgggccagagactaaggcagaagccagtgtggggagagaaatgccctctccattaaacctcagcgtcctgcccgtggggcacctgctgaaacgaccaggacaggcatccttgtgccagcacagctgcgggtgggcaggctgctctctggctctggctgggccagtctgaggagtactgggcttgcacctggcctggtcctcaccccccaaccctgcctccctggacccctgacccagaggggacacggagcttaggcccctcagtgcccggcctgccctgcagagcttcccctggaggctgccccgaggcaacgggctggtgctgccgccacacaaggagcgcccctacaccattgctgccgccctgcccaagccctgcttcctcgaggacttctacggcccctgcgccaagaccagtgagaaggggccctacttcctgacggagtacagcactcaccagctcttcagccagctcacgctgctacagcaggtgaggagggcgaggatctgcgcccaggtcacctgcgagtcggggccccagaaacactccgcgcccatagggccctcagcggctgcttccagaggaacagacgggcagagaaggggccagctgccaggtgcacaggttgggggtggctgccaggtgcacaggtccaggcggctgctgcctcaatgggaggccccagcaaagctgagtcctcctctccagaccactgcccgctgggcctggccctgcctctgcccagcactctggcctcacaggcactagaggatgccctgagggccgcatggggcgctgagtctctccccccagcccctccaccggagctgggccaacccggttccttgtgcccccacccagctgccagggccctgcccaacttcctctgccgccaccacagccagccctcaggtggcctcttcccaggtccctgccatcccgggagcccacatcatgtagcaggtgacagcagtgatgccaatctagtgatccacctgctgtcacgagggctgccccggacaccatgagcccctgggggccaagcacatggggagccctgcagccgacccctgtggactgttagatgggtattgaacctgggattgcagagctggccccccagaaaacacccaccctccctgggaccctgccttggacacaaggccctaagggatggaagcctgaacctcttgtttccatgttctgggcaggagttgtttcaaaagtgccacccggtccacttcctgaactcacgggccctgggcgtcatggacaagagcactgccatccccaagtgagcgtccgggaccctcagctgggagcggtggtggagggtctcgggggcttcccgtaagagtcttgtggacgctcctgaccagcaggagatgcctgtgtctccagagacgcgagagagtggtgtctgccagttggagcggcctcgtggcccgaccccagcccaccctgcaccagcagccccagggccgggcagggccactgcacaagtcctgggggtgacagggaccatatttctcttccagagccagctcttctgagtctctttcggccaaaacctgcagcttatttctgcccaattacgttcaggacaagtatctgttacagcttctaagaaacgcagatgacgtcagcacctgggtggctgcagagattgtgaccagccacacctccaaggtgggcaccctacagttccgaggccaacacggggcgtggggcccacctacgcgggggtggcagcgcctcctataaggccgtggcctgaaccctctcccaatgcagtgaacccaactctgtgtcccttggaaccacacccgacccaaggctgaggggagcagggcacaggcttcactacatcaggaggaggggggtcagccgccctcccagctctcccccagcactgcctgccacatccacggccacatccacatccacggccacttccacagccacgtccacatctgcagccagagatggctcccctcagtggtgggtgatccttggctgtgggccgcctggagacccaggacaagctgcacccaccactgctaccacccccacctgtgctcaccacacacagagtccctcacgcaccacccccagcactgggctccgccacacaccccactccaccccaggccccatcccctctgtgcctgagcctggcccctgggctggggcttgtgatgcccagcgtcccaccctgggctcctcctggccgaatgctcattgtgggttcttagtctgtggaacggatcggctccgtggtctgaccaaggtcaaggtcaagctccagcgccggggcccagtctcagcctcttctaggtcctgtggggcttgggctggactgggggctcctcccctgacctgccccacctgctgtcaggcagggcactgtgcagcccctagagagtcactgcctcgaccagctcatccttcacggggcttacctgcccaggaggcatcagggtccacagcttctcaggaggccagagtcccccagccccaggggtctgcaccttcacccagcggatgccttcacccagcagacggacagcctattacagaggactgtgatctcctcacacctgagctcagctggcgcttggctgtcgtgggctggggtcaccaggtcccgctccaagtaagactcaggattacagggccccttcccccacagcaggcaggtagacgcccaccccctcctgggccggagctctctgaaagcaaacttgagcccaaggaacaggactcccggccacgaaccccatcactgccgtccctgctgctgtcccagagtgggctgaaggctctgggggaaccaggagctgctcgcagtccaccaaggtgcagtacctccctgccaggcggcaaagccacctccacggtggacagagcttcccttcctattattccttcacacccctccaagcccgcaggcaaccccgggccgtaaacgaaggcagaggcaccgccttctctcctcccttggggagaactttccaactttggggatttgtcgccagggcacgccagcacggggcgtgggaacagggagcctggttgcctctttcctcagatccatggttttcaccatatcgtgagggacatgaaaatgcgatttccctaaaccagagccttcacgcacggcccgtgtggccaggcttcatgaggatgagcacaaggacaggtggctgtcacctggccaacccacatcgtcctgggcgcaccctcaccccgagctgccccagcgggtggaggactgcccctcccagcctgagacccacctcgagcctgcggcggccctgcctgagggtctccgggatggccgctcgtcctggtcacgcacccgtgtacaggtctgcagggtgggcaagagtcgtgcaggctcacacccagggctgctggcacccagcgtggccgggacagagctcggcactgctgccacatccccgttagcaaaagggagctgcggatcgctcagaacaggcccctcacctcctcacgggagcggacggacctcgccggagacccacttctaaaagcaccacgctcgtccatctaacaagtgttagagccacgatgtcctgacgtattgtgtctcaatggctgtgaggtcggaacaatccaggacactgagtttcacatttgtaaattcaggaccccagaaaatcattaaaatacaaaattcgagcacagagggcagcagtgatcaataaaaatgctcgggggtcagtggctccgttctgacgatgcctggagtgaggcgaggtggagacacaagggcaggaagaaacggcataaaatttctcacctgaagaaaatggggggtcggtggttccgttcagacaatgtcttggtggcaccgtttagacgacgtctggagggagacaaggtggaaacagaagcaggaagaaacagcgtaaaatttctcaccttaagaaaacgcaggccggtcgcagtggctgatgcctgtaaccccagccctttgggaggccgaggagggcagatcacttgagaccaggagttgggatcagcttggacaacatatcgaaaccccgtctctactgaaaatataaaaaattgtccaggctggtggcgcacacctggagtcccagctcctcaggaggctgaggcgggaggatcactggagcccaggaggtggcggttgcagtgagctgaggttgcaccacggcagcctagacgacggtgcgagaccctatctcaaaaaaaataaaaaataaaaatggggagtttgaaagcagaatagggctttggtttctttagatttgtttaaaaatatggaacaccatagccaagaggtggaggcacctaaatgtccacggagagaagaacagataaagaaaatgcggcctctttgtaccttgagaacttattcagccttaacaggagggaaattctgacgcctgcggcagcacgatgaacctcgagggactcaggctcagggaaacgagccagtcgcgaagcacggacagtggacggctccacgtacacgaggcgcctggaggcgcaagattcacggagacaaagtagcagggtgggcgccgggggctgggagtggggcacggggagctcgtgttgaacggggaccgagtttccgtttgggaagatggagagtcgcagacatgctgcacagtgtggatgtagttaacacggctgaaccgtgcactcagaaaaggctacaaaggtaaatcctctattacatactttttacaattaaaaatcaaaaggttaaaacaacagtgaaaaagtgtggcgaaatagttttatctcaaaattacatactttgcatctacttaaaccgatgaagaaacagactgagacgtcagcgtagaaagtgtatccggtaaacacttctcaagctcctctcaaggcgctcaggcaagagggctggggccgcagtcggggtgagcccaggatcacatgaggcgccttcagctgcacaggggccctgcagacaagagttgagcccgggggcaggcgcggtggctcacgcctctaatcccagcactttgggagtccgaggcgggcagatcacgaggtcaggagttcgagaccagcctggctgacatggtgaaaccccatctctactaaaaatacaaaaattatcacgcctgtgatcccagcactttgggagtctgaggcaggcagatcatgaggtcaggagttcgagaccagcctggctgacatggtgaaaccccatctctactaaaaatacaaaaattatcacggctgtgatcccagcactttgggagtccaaggcgggtggatcatgaggtcaggagttcgagacctgcctggccaatatggtgaaacctcatctccactaaaaatacaaaaattatcacatctgtaatcccagcactttgggagtccaaggcgggcagatcacgaggtcaggagttcgagaccagcctgaccaacatggggaaaccctgtctccactaaaaatacaaaaattatcacgcctgtaatcccagcactttgagaggctgaggcaggagaatcacttgaacccgggaggtggaggctgcaccgagccgagatcgcgccactgcactccagcctgggccacagagcaagactccatctcaaaaaaaaaaaaaaaaagagtcgatccggggcatggcgtccagctggactctgcagccttggtttccaccaaaggatggcccaggccaaggtgattcctcagggacaggcagctacaacaggaggggtcagctgagttctccagaatcttcctgaagccctggaagtggatccaggaacgcagccctttgggactgctcagaataggaatcctgctgggtgaggcattcaccacccatggggtgttccaaccaaggccagcaaggtcgtcaccgccagccacagagccccggaggagggggcggcactcaggcacccaccccggactgcacccaaacactcctgccacgggcttggcgcagcgggttggggggtgggcacggagctgcctgtggctccccatctgcctgtggacacgacagcggcctctccctgggtggggtcgcctttcccagtcctgaagctgcctggggaggtgcatccaggcacaatcttgcttttgagaagtgagggtggacttcttttcaagtctttccgcgtatcaggctttgcttttattttgttttatttcaagtcatgcccaccccgtcccgccagcccagcccctccacggccaccgctcacctgcgtccacacagccgcttcctttccacacacgtgatgcagcacacgctcttgtgtcttggagctgggtgattttaacaggttctcaaatattccctttgttcatcttaaaccagaagacgctgaatgtgtcattttcttattgcagctgcaggtgaacttgctgtccaaatttttgctgattgcaaaatcttgctatgagcagagaaacttcgcgacagccatgcagatcctgagcgggctggagcacctggccgtgaggcagtcccctgtgcgtccccctcgggccccaaggcgggggtgggtacccgcacggccgcaggaggctcacctgtgctttcatttcaggcctggagaattctgcctgcaaagatagcagaggtcatggaggagctgaaagccgtggaggtaccagcactttacgtggccgggcggctttggtcccccgaggccctctcctaaacgaactgctgtgcagagcctgccgcacccagacgcaggcaccacagagtgtgtgcaggtggcccagccagggtggcctcacggaggccttggagtcatctcccggcagggcctctgttgccacctgggcagaggtgtcccacctgctcggtcccggggccttgctggtctgagttcctcacacagagcacaggtgcccagaggacagcactgaggtctgtggctggggcctgagcttgaccgacctggacctcctccaggacggcaggggtggcctcatgagatgatgaacaaggaattgctgctggaagtgaccagccatccccaaacatgactcagacgagtcccagagcagccacagcctgtccccgtcttgggtctcagagctcggcctcaagccccagccacagctgtccacgggtgggacggctcctgcatgtctttgctggacacgcagacacggggccctgctctggtcagccggggtctcatttagggaagctgggttacctggcacttcctggagtccagcagagagcaaggaaagggactcaccatttcagcagcaggaggcacaaaacctcccagcggctgtcagggccgtgaaagcttaagaccccgcaggtgtgagccaagtccaaccatccaggaacattcgggactggaagctaattcagagagccgggtagaccccgtgcgtggagaacgcaggacccgctgggactggttgggctgcgctggccccggctgaggctcctgcactgaccacgccctgtctctccccggcccacgccccggctggaccaccaggtcttcctgaagagcgacagcctgtgtctgatggaagggcggcgcttccgggcgcagcccaccctgccctcggcccacctcctggccatgcacatccagcagctggagacaggcggcttcaccatgaccaacggggcccacaggtggagcaagctcaggtgaggaggggctcaggcggccgcgcgcccaggagaggaggggctcaggcgggcgcgcgcccaggagaggaggggctcaggcggccgcgcgcccaggagaggaggggctcaggcggccgcgcgcccaggtgaggaggggctcaggcgggcgcgcgcccaggagaggaggggctcaggcggccgcgcgcccaggtgaggaggggctcaggcgggcgcgcgcccaggagaggaggggctcaggcgggcgcgcgcccaggtgaggaggggctcaggcggccgcgcgcccaggtgaggaggtgctcaggcgggcgcgcgcccaggagaggaggggctcaggcggccgcgcgcccaggtgaggaggggctcaggcggccgcgcgcccaggtgaggaggggctcaggcggccgcgcgcccaggtgaggaggggctcaggcgggcgcgcgcccaggtgaggaggggctcaggcgggcgcgcgcccaggagaggaggggctcaggcggccacgcgcccaggtgaggaggggctcaggcgggcgcgcgcccaggagaggaggggctcaggcggccgcgcgcccaggtgaggaggggctcaggcgggcgcgcgcccaggagaggaggggctcaggcggccgcgcgcccaggtgaggaggggctcaggcggccgcgcgcccaggagacgaggggctcaggcgggcgcgcgcccaggtcaggaggggctcaggtggccgcgcatccagcagaggaggggctcagatgggcgcatgcccaggtggggcacgctcaggtggcacctctcctcctgtccttgcttttcagaggcctgggtaccttgcccctcacttggcactcacagcctcagacctccctctacccaagataacctccagccacctccttctctgcaaatctggagcatttcctgcacttctgctgtccatggtcccaaaacactccccgtggtctctagggacccctgtgttgggacccaggcacactttccaccccaccctgagggtctctgcagcacagaggctgcccggcagcaacctgtcctgaccgctgggtgccacagtgtccctgctccccttgaaacccctctccctagagacatccaggtgggacccaggatcagtcctcagcctgttcctgtggtcctgctgtccacctgcccagcacctgggaccaactaccttgcacaccacctgggaggcgcagactggggctggctgtaaaacctaccaccacgacccacagggctcacaccccaggccacacaggctcttccacctggtaaggcacaggggccagcctctccttggagccccaggcctgtgtccgatgaccctcaggtgcccacagccccaagctcggcctcactctctccctcaagacacaatctcccaccctcccgtctcatctcatcgcctgccgttgtccacacacggtcaggtggaggctgcccaggccacggcggctccaccctcccccacggtagatggcctcacttggggagcaatgctcagcggaccaggtgcccatggatcctcagcctgataggtgaaggtccccttcttagatagccaccaatttaaaaacaataattataatatgccataaatgtatgcttatcgtaagagatcagaaaacccatgtcagcaaaagagaagttaaaaacttaaggtaggccagacgcggcggctcacgcctgtaaccctaggtaggccgggctgggtgcagccactcacgcctgtaaccctaggtgggcagggctgggtgcagccactcacgcctgtaaccctaggtaggccgggctgggtgcagccactcacgcctgtaaccctaggtgggccgggctgggtgcagccactcacgcctgtaaccctaggtgggccgggcgcggtggctcacgccagtaactctaacactctgggaggccgaggcgggcggatcacttgaggtcaggagttcaagaccagcctggccaacatggtgaaaccccatctctactaaaaatacaaaaaattagccgggcgcggtggcgggcgcctgtagtcccagctactcgggaggctgaggcaggagaatggcgtgaacccgggaggcggagcttccagtgagccgagatcgcgccaccgcactccagcctgggcgatagagcgagactccgtctcaaaaaaaaaaaaaaacttaaggtgatgctcaatcaggaaagaaaacaagccaagagtggcacttgctctccacagcgtccacgtgcgtatgtgagcgcctccagatctgcccttctcagcatccccatgtgtgtgagagcccatccaggcatgctcttcccggcgtgtgtgtgtgtgtgtgagagcccatccaggcatgctcttcccggtgtgtgtgtgtgtgtgtgagcccatccaggcatgctcttcccggcgtgtgtgtgtgtgagagcccatccaggcatgctcttcccagtgtgtgtgtgtgtgagagcccatccaggcatgctcttcccggcgtgtgtctgtgtgtgtgtgagagcccatccaggcatgctcttcccggcgtgtgtgtgtgtgtgtgagagcccatccaggcatgctcttcccggcgtgtgtgtgcatgagagcccatccaggcatgctcttcccggcgtgtgtgcgtgtgcgtgagagcccatccaggcatgctcttcccagtgtgtgtgtgtgtgagagcccatccaggcatgctcttcccggcgtgtgtgtgtgtgtgtgagagcccatccagccatgctcttcccagtgtgtgtgtgtgtgagagcccatccaggcatgctcttcccggcgtgtgtgtgtgtgagagcccatccaggcatgctcttcccagtgtgtgtgtgtgtgagagcccatccaggcatgctcttcccggcgtgtgtgtgtgtgtgagagcccatccaggcatgctcttcccggcgtgtgtgtgtgtgagagcccatccaggcatgctcttcccggcgtgtgtgtgtgtgagagcccatccaggcatgctcttcccggcgtgtgtgtgtgtgagagcccatccaggcatgctcttcccggcgtgtgtgtgtgtgagagcccatccaggcatgctcttcccggtgtgtgtgtgtgtgagagcccatccaggcatgctcttctcggcatgtgtgtgtgtgtgtgtgtgagagcccatccaggcatgctgttcccggcgtgtgtgtgtgtgtgtgagagcccatccaggcatgctcttctcggcgtgtgtgtgtctgtgagagcccatccaggcatgctcttcccggcatgtgtgtgtgtgagagcccatccaggcatgctcttcccggcatgtgtgtgtgtgagagcccatccaggcatgctcttcccggcgtgtgtgtgcatgtgtgtgagagcccatccaggcatgctcttcccggcgtgtgtgtgcgtgtgtgtgagagcccatccaggcatgctcttcccggcgtgtgtgtgtgtgtgagagcccatccaggcatgctcttcccggcgtgtgtctgtgtgtgtgtgagagcccatccaggcatgctcttcccggcatgtgtgtgtgtgagagcccatccaggcatgctcttcccggcgtgtgtgtgtgtgtgtgagagcccatccaggcatgctcttcccggcgtgtgtgtgtgtgtgagagcccatccaggcatgctcttcccggcgtgtgtgtgtgtgtgagagcccatccaggcatgctcttcccggcatgtgtgtgtgtgagcccatccaggcatgctcttcccggcgtgtgtgtgagcccatccaggcatgctcttcccggcgtgtgtgtgtgtgtgtgagcccatccaggcatgctcttcccggcgtgtgtgtgtgtgtgtgagagagcccatccaggcatgctcttcccggcgtgtgtgtgtgtgagagcccatccaggcttggcctttctttgccgtaatggacgcccctttctttgtccctcacactgggcatgtggtgtttccatccaaaatcaggacagggcgtctgtctgtggcatcagtgtccccaggcctggctgagggctcctgctcgtgactggccagctttctccattatattctatggtgtgctggtcactgtcaaccagctgtcccaggcttccggccctgggccccggccgtggcgattcccaggtgtgaatgtgaacgctctgcacggcagcagagagtcccttgcctgcctcgtcctctcagctgcagcccctgcggcagactgggcttgactcttcttgggacgctcagcagggacgagcctgagcctgcagggtttccataagcgtgtgtggactgaaatgtggatggatggacagtcagacagacggaaaggtctgagtagtgacctttccacctcgccaataaatacagacaacccacccttcagaatttacacggtgaaaagatttagtccaaatgattcctaagaacgcggggggactccctccccacggaagccgcgcccctgccctgtgcaaactaacgtctcttctttcctcaacggaaggaacatcgcaaaggtggtgagccaggtgcacgcgttccaggagaacccttacaccttcagccccgaccccaagctccagtcgtacctcaagcagaggattgcccgcttcagcggtgccgacatttccacactcgccgcagatagcagggccaacttccaccaggtctccagcgagaagcactcacggaagattcaggacaagctacggaggatgaaggctacattccagtagccgagctcgggcctggtgtggaattccagatccgaatccgactgtggggggcgggctgggaggtgggagccgcgtctcaggcccggccgttatcaaggcccctccgcccccgaaccctggggagctggaccaggaggtggaggctcaggggaccccatggggacaggcagagctggtctcctcccagcagacggagccaggacgggcacaagagtcttggaggtttgcgtgtttctgctagaattaaaaagttaaatttaaaaatgaaaatgaaagacagcttcccaggagttttgtgcctgtctgcgcctctcacacacagataagtggctcttacccagctctcagtgactcccccacaaaacagcaacagcctccaccgccaactcaacaaacttcagagtagctcctccctgagcaggtttctgagccagcctgggttggctgagcaacgaagggccaaagctgacctctgagtggccaactgcagctcccagggactccgagacctccggtccgagaccctgcctgggttcaccccccacaacccagacccagaaccgctctccccttccctgcccagtgcccctcctccccagcccagacccccaggtgcccaaggcctgctgctggagcaggcaccttgggctgggcctgctcccccagggcccagggccccccagcttagaacagcccttggtgaggtggtcatgcccgggcaaaggccctgcttcctggaaaggacactcagagcagctccaagacagaggctctgtggcgggggtccctgagagtgcccccacccatctcatgccccagggaccgccactgcccaccgcctccagcagccatgcatgtgcgcccgcagccctgcctccacagctcgccacacactcacgcttcgccagagacaggaagtgcgctgcctccacggccccttgcccttgctcaggttcttggaccccaggcagctggtgtggagccccttggccagggccatgggagtcccgcgcagtcagctccacattggcctctgcagctgggtgaccagagccccgggcacggccccagctccgtggggctctcacggtgccaatcacaagacccagggttgtgcttttgagttttagaattagtcattctttagagcagccagctagtggcatttctaggaaaactgtgacctgtgacaaatcgctgcatttttaatgtcaagatgtgttttcccacataaattcaccggagacatccgggccccgcttcgatgtaacatgagaggaagtcggcgtcctggccacgaaatgcagttcacttttttttaggcttttatatggattatgttttgctgacccacgcccgcattttcagattttgtatctaacagacagtgctcagtgcaaatcaacattccagcggtcaggactgaccccggggcagcactgggctcaggcttcagcgcgactgtccgcatggctccctcccgtcctggcaccaatttctgaataaagtcctttctaccagctgctgctgtgtggtcactctgcgggtccccacggtgacctctgcaggtcgacacgttttccttcatggccgcacgaaggccccttacaggtgctcacaaggactccaggtgcgagatgtgctcaacccaggactgaaaacgaatctgccggtccacagcgacgccctctgatgccgcagagaaaggcccgggcctgccagacgtgtgtcacaactcaggccccgccaggaggaaagctaccgccagcactcccaggccgtgggaacaagcaaacgcaccggctggggcaggaaacacttgcttctggttgtgactgcaaacagcctaaaagaacggactcccgtaaccacgctcctgtgtgcgcacatccaggctcgccctccattgacaaaaaggacgtccctcatgctggatgtgcagtgtcttcatccaagatcaggacgggcgtctgtccatcagttcttacaggctatttgcacagacccacggctgttcttgggtcaatctgcgctaaactctgcccaacccagccagttcccacctggcagccctgtgggcaagacagagctgggtcccccgtcatcacggtgcaagctcgccgtaactctgaccacagtggagcaggaggccaggacggggagctcctgcaggtggggcttgtggcccgggaaaggacactctcacggttgtcacagggtaagactggtggacaccactcagggaggggctcacagccagggcttccaatggttttggggttgtaaactgtggatgcttttgggaaaagagctgatgggtctttcgggaagttcccgtgatgaacggtgcggttatccgcctggagggaggcccaggagaagccgagaagacaagatggtggagtccaattgtgctggacaggagctgcccgagacagggggccctggtcctggtcatgtgtgcgtcctcgcccccacgccatgcaggccggacccctcactgcagtggctccaataaattcagctccgctgagcacaggacttttctcttagagagctgacagccagcaacctcatgagcctcgcttctcggcgccatccactccccggctctgtcccccacgccgccatccactccccggctctgtcccccacgccgccatccactccccggctctgtcccccacgccgccatccactccccggctctgtcccagacgggttcaaggcaggctgtgctgtgcactgcagtgccactgtgggctagacagtctgcgctggcgtcctgtgcaccatcatctctgatctccacccatcagatgcccccagcacccccaaccctcagttattaaaaatcttttttttttttttgagacagagtctcactccgtcacctaggctggaatgcagtggtgcgatcttggctcactgcaacctccacctcttgggttcaagcgattctcctgcctcagcctcctgagtagctgggactacagacacatgccacgacacccagctaatt

SEQ ID NO: 312 - DNA, 19930 bp, Homo sapiens
  source 1..19930: mol_type = genomic DNA
gacccctggcctctgccctggttactcacagggacatctgtgaatatctgctgctgccccatctggccccggtgaggctgctcctccctttcacgttgggccccactgcagcctcctggtgttcaccgccagggcacaccccaggggaactggggtgggatcataagcacagggtaggccctccctctctgcctggccacactgcactgccaggtgaattaaacatggctcttcccccaggtggtgcttgggggcccgtgcagcaggagggacatcttctccgcacagcaatgttcccagatctcaccaccctgagttctggcccctgcgttgggcgggttggcaagtcaagagaaaaaacaagcccctgcatctaattttctgtcttctctctgggcccttcctctttccactaatatgtcaagaaacaacagtgtggtatttttgcttaatttcccctaaactctatctgtcctgctttccactgtgacctcaccacctgaacttcctggacttccttacactggagcagacactggcatctgctcagctctcctgtgctctgcaaggggtagaaaaattcacccatcctctgctatgtgcagactgtccaccttctgctatagagttcatgtacccacctgtcaacctcatagtcaaacaaacaagacgttatgggggaaaacacccggctgatggttgaaaaacaaccagagaagaaagacagagatgtagaaaaagagacaaagacggctggacgcagtggctcacgcctgtaatcccaggactttgggaggctgaggtgggcagatcacctgaggtcgggagttcaaaaccagcctaagcaacatggagagccccccgtctctaacaaaaatacaaaaaattagccgtgtgtggtggtgcatgcctgtaatcccagctgctcaggaggctgaggcaggagaatcgcttgaacccgggaggcagaggttgcagtgagccaagattgcgccattgcactccagcctgggcaacaagagcgaaactccatctcaaagaaaaaaaaaagagagagagagacagagagacacacagtgagagagaaagacagaaagagagacagggacagagacagacagagcagggagaatgtgtcccacgtgaagaacagggaaaatcggtcacaatgttcacacaagaaagcaaagatacagagtacagcactgggaagcagatcccaggaggaaattaaacctgagcacaaatagaaaattaaagctcagtacaaattaaaattgggtaggccagtcaggtaccaccctctttgaaccagcacagaaacctcccagcagaccgagctgcagcccatcccggggttcataatgtggagtcaggagcctcaggtgggtctgaagcccctgtctctgagacttggccgaccttggacaggttacttcatgtctcggtccatagtttctgtttttataaatgaggaaaataatagagcacgctgtggagggtttgtaggagaatttaatgtgtccacgtttgcctagaactaaattagcaactgccccatagaaagagctggctgagtttttgctgaattcttaaaaatctttcttttcttttctttttttttttgacggagtctcgctctgtcgcccaggctggagtgcagtggcaccacctcggctcactgcaagctccgcctcccgggttcacgccattctcctgcctcagcctcccgagtagctgggactacaggtgcccgccaccacgcccagctaatttttttgtatttttagtagagatggggtttcaccgtgttagccaggatggtctcgatctcctgacctcgtgatccgcccacctcagcctcccaaagtgctgggattacaggcgtgagccaccgcgcccggcctgtttttgttttttaaagacaaacacagattaacccaaatgagattctgccgcctcctagtggtacatagggtaattttctgtgtcaatcagtacatctgaccctacaggtagggtggatactcagaaatgcctcaaccaacagcaggctcagtgattccttggatttcctggggcgtgtgagtgtatgtgcatgtctgtgtgtgtgcgtgtgtgtatgcatgtgtgtgagagcatgcattcctgtgcatgtatgtgcagatgtggacctgtagggtcggctctctgccttcacccagccacacctccctcattcattcctgatacacgtgatttgtcagaaaacactgacaccaatgtgaagtcctaagatgagcaagttcagaatatctaatgtatcgtattcgtggtgatgggtgcgctgaggaattgattgtgactgtcattgcacaatgtacgtgtacgacaaattatcacattttacaccttgaatacgtacaatcctgatcaattaaattttaaaaagaaaacgctgacacgttttcgtaggtcctgtttccctcactcagctttgaacaactgtgaaggcagagagtgggtccgagagacctatgcacccaggaccaggcctggggctgccagatgtgaggccttcaaaattatttattgatgcgtggagtaaagcacaacccagagaactgggcttggctctcagctgtgtgtgtatagcacagtctcaaggctagctcttgacttctaggaaggtctttagggtcagcagggcagataattacagcaaagtctctggggtcactggaggttcacagcagacacctaggacaagcttggaggtggcatcactgctcaggaaatcggctgattggctgtagctgggcctttagaacaggcaggtgactttagctgggtctctggaaacagtcaggtgaataaagctgggtctctagaaacagccagggaactgtagctgggtctctggaaataactgagaaacagtctgtccaaggagctgctcgattgtagaagggaccacctggctaacgaaccttctggatgctggttagaaacctccagtctccagctcttgtctccaggacagctgcctggctggctttctagatgaagaggaatccaacaggaagccttccaaatggctgcttcaggcttttcctagagtgactttctaccctcaggtgcagaggccaggtgggtatggggtcagtgtctggcaacggctgcatacgtgatggactcggccatgggctttgtggactgtggggacacagcccgggctgtcctctgtgtgagggcccagtggtccagctgagcatacgtcacctcctgggaactccctgcagccagggcctaagagggagagacccagggtgagggagtgcctggtggagggtgaggcgaggggctgtggggagggagggctgtggcggccatctccatgggccctgaggaccctctcctaaattgcatccgtgtgaagagccctcccacagggtattggggttggtttacgtgacaatgaacaaggcagaagggaagactcctgacttccaagctgagccaaaagacatggtgcttctgtcccctccctgccacccatccttggatccctccctctgggggaagccggctgtgtggagaggcccctgtgagaggaacagaggtttcctgcccacagccggggaagtgagcgtcttggacgtggatcctccagcccacgggagccttcggatgcacacagccctgggcgacctctcgacagcaacctcaggacaggccgtgagccggaaccgcccagctgagccactcctgaattcctaacccaaggaactgagatttttttaagctgctaaatttggggtactttaataactagtaggaaggctcaccgaggtgtccgtctctctgtccttctcaggaagtccattgactgtggccttgtcttggggagaaaatacatggtcagttttctggggaggatgtcgcaaggcaaatctgcctgagacccccacccccagcttccgatgacatcctgcacccaatgtataatacgaccttctagaatgttcccaaagattcttccccccaccccccacattgcatctggattggcaccaagtccccacttccccatcccaggcctgtccctcctcctccccctttacctgctgtcctctctagaacatcaacagccaggtcaggcctaagaggaaaaataaaagtgaacctcaggggcagcctggcggccgaggactgggtggaggtccaggagtcattcccaggggcctcacctctgctgtggcttctgctcctcgtccttgcttctggggggccctaaggacagtcggggtgtgaattaaggagaccttcttcctagcctctcctgacagcttcccaggtcaccccaccctgcccctgagacctaccctgctttatctgattctggcgatggaggcagaagaggaccaggaggaggagacagaagaggaagaccactgagaccccgatgagaatatacagatgctcagctttcaggccttgggaagcaggtgcatctaagaaagacagaaacaggatttcagcagtgtgcatttattgagcacctactgtataccacacacacgtcacgtgcgtttcatagacttactaatatataaaatatcttaggtaaataatagtcctgcagtacagggatcgttatccccttcttccaccaccggggtcctgagtgctggagtcctctgcacagggacacagactgccattggcagagcaggaatctgatcaaccccaaagcctgacctctttctccttccccaagaggcacacaccagcttcatgctccacggcccccatcactcacgctcattgtgactgttgtccgacggcctctgcgtgggtcctgggagggaggaatcagaaggaggaggagttagagtcctgagctggacagagaaggctctgagtcctcccacatccactgtggggatctcccttcactccccaggaccctgactgctccctctagaccagcaccgaccagcagagtcttctgtgatgatggaaactttctacatctactgtccagcatgagagtcacacatagctattgatatttaaatttatccaaagttgaatggcatgagaagctggctgcaccgtctgcacctccaggactcagtgaccccacgggcctgatgccatccctactggacggtgcagatacagcgcgtttcctgggcgtgaagctgtagtagacatcgctaatttctgccctctgcggatctaggcagagaccaaccacccgcaacaagaggaagggagaccttccctccctgacctccttctgggttcccaccagagggcaagaatcctcatgtctgattttatctgccctcgcggcaaccctctgacggggatgtaacccgccctcctgtgggaagaatccaagtcccgatgtgctcctctttcctgaagccctgcagctagcgggcgagtgtgtggggcaccgcccaggctccctacgcagcgcattgcaggcccgcccgtcatctcctccaaccttcaccctcctctgcacagtgcacgccactacccaattcccaggtggctaaatggggtcctgaggggctcccccaaacccagggtccgagccaagcgtccctcttccaggaacagcggtccctcccctcccccggggctgaggcagcatcttcaatatccttcaagaaaggcagacattctctcttggaatgtccttccctcctgcctcgtccacggtctaaggtccaggacaccacccgttattctacaccatgacttcctgggcttggtcttcataacatttgccaccatttaaaattacatatgtattatatatgtgcaatattacagtttttatattatttatagttatatgtatcatgtattatgcaaatgtataatatataacaaatatatttttaattatgtaatcttgacatatacatataatttaatgtatataatgttaattgtatatgatttataacttataatatatgttacatatattcactataatatataatgtataatttatatttgatataaacctatgattaaatataaaatattttttctattatagttatacataatgtatacataatagataatatatttacattaatacctatatttatttattaactataacacttgaaatttattatactatatattgtaaatatatctttcatataatatataatatacactatagtcatatgtagtgatacactaacatgttttattatataattatcttccttatatatataatatatatataatatatatatattatgatgtaaacatatataatataatttaaattataggtctgaaattctacattgcaaatcatatatttttatctgtatatgcatgtatgggaatcagtgcatttctattgctcattctaactatttctccccattgaagttcacaagacgggaggccatttctcctcattcttggtgcatcaaatccggaggcttcagtgcctggcacagtccctgtgaggacaaaatacttcctcagtattaataggagcatccctcctttggggttttctaatcagcactgatgtcagcgccgtgtgtacctgaactcaagtctgccctaaacgattctaccaggacagctcttctattgcctctgtttcacatgaggaatttgggacacaggaggtttgggtgagtcaccgtcaggcatagagccaggaggtggcagaaccaccgggatttgaaccatgaacccagcaatctggctgcaggagggtctgtcctcgtgacctttatatgtcactgcatgaaggtgagagaagagagaaggaaggagaagaagagagggagagaaacagaggcaagatattcccgcagacagaaggctaataaaaaccagacactggacttgaaccaggtctgcgggactcaggagcatgtcccgctgtgccccagcagcccaggagcctctgagggggtccggatggagcacggcatcgctcctcccacctccccatgtggcttcagcccctggtcccacctgcctgagctcacagcccgagcctcacaggcagtcaccgggtctaggtccaaggacgtactctggggatagaaacccaggtggggaaggggccgcgaatggcttatgaccccgtgtcctcccctgggagtttctggtcacagatcacagggggagatggacaacttgagacccagggacttggggcagcttcaatcccatcacagagtccagggcagagccagatggaagggaagcctcatggcttcatcctggtcaccgttcacagctacgtcccctccctgtggagccctcctcctcttaagggaccttactccaccgttcaggcctcccccggagatcacagagccaacaggagcagccccgtccctctccgggtgtcccaggttggaaggtgagttctaagtccctccatcaggtgcagagcggggtgaatggtgaggccacgcccacaagggggcagcgtggagctcgggcgagcccggaagtctggggtggggctgcccgggtgggtggcccctgccccttcatggccttgtgccgttaagcacgaaactttaatttatgttttgcatattagagaggaggaggagttagaggatcagactagtacctcccccattaagtggtgcttgcattaagtgctttccacagttcctggcatggaacaaggttgcaatcactgtaccattgctgctatggtctctgtgagcattagcgacctcccagagcttggtgggtgtcggtgccttcccgtggcctccctagaccttgactccaagcccagggcagagggctggacccggaacagcatccgcagcacagattcccctgtaatcccctccagctgagggccctgctactgaccagctgaggagccgggctctgtgtccggggagtccgggcctccagaggtttctgtaaacaggggcaggagaaggatttagaacccgtcccaaccaacctgccctcctccaccctgagcccccatccaaaggccgcatgaccatcacgcaatcccagacaatgtctcgagactcctgagaaaacgaggcaggggacaggaggctggggagagccccgctgcttgccccattctccctggggctggtcactccctctgctcctcccaccacaagctcttcttgacctcaggggacctttgaggtcctggggggacatgaaggtggattggagcctctccagtggactttgactccaggacatctcgggctgagcacacacaggggtgcatgtggtcacataccaaaggttttcccaaagcactgtcccgccctggtcaggggccatccctggaccctgcgttctgcccagtgggagatgaaccactccaggagaagcacattgcctggggcaggttctggctcagtggaaaggaataagcgggaccatccatcccgtgtgaaaagacactcatcctcttgtaggggggttgccccctaatctctgggaacccactccccacccagccaagcagagccagctctgagcccaccagatgctggagctgagtgtccacgccatccgtggcgtccagaggagatcagggctccagggacctaagcgggtatgaggcagaggggaggtgtgtgcagacggagaggggaaggggagggcttggcggtcaggaggaggacaaggttggccacagaggacagcagctgggacagggtccagggacctggggacaagctcgagggtcgagctgagactggggcagggcccaggtgacgtcctcacctttcaccagcagctccaggtagtcactctgctcagaccatttagggggcttataatagatgcagcgataaggcccggcatttccttcacttactgagtcaatgcggaatctggcctctgactcagatggactagcttgagacacatcttcagtatcattgtatgtggatctactctccctctccaggcggaatgtttgaaccccaaccgggccccggcacacgaaagtcacatggctccccagggggatcacggtgcctggctcagccgagatggagggtctgggcagatcttctaggagggaagcagagcaggatctcagcgtccactgtaggaagtcaccatgccacacacgtcattttagcatcacaattcagggattttagcaattttatagagttatgcagccatgaccacagcccaaccttagaacattcccaagcctcctgcaccttctacgtgcatgtgattctcatcactgcagagttttttcccagttgacagtgaggaccctgagacttgctcacaacttgggccttgctcagggtcacgtgggaagtgtcggagcaggctggggcccttcatgcctgctgcagagcccagggccactttccagagggacagagtgtgggagggaggcacaggatggggatgacagggtcattggtgaaggacaagggacagagaagcgagggctctggagatggcttgtgctggggcctgaagggcactggccggtccccgggtgggactgagtgtgggatgggggttgccaggctcctttgagggtctggtggggtgagggtgaagcccccagccctgatctgctcacagcagatgcccagcccgtgacaggtccccattgctaatgcagatctctgtggagacaccacctctgggttttcctctatagtttctactttcttctcagcctaatttgcatttccttcttattaaggctcttgaaaaaccccatttatctcaactgggcttggggtggaggaggaagggcgggtttgacgccctgaaacaggaaggttgtgtcaaaattagcaaaatccctgagcggggcagagagctggcagggcttcaattcactcgtcccgtcttcattcattccttattattgacaaattaaaactgcatgtatttaaggtgtacaacatgatgttttgatacaggtatacactgtggaatcgctgaatcaagctaattaatataacctcactttgcgtagttaattgttgtggtgagaacatttaaaatctgccctcttagtgattttcaagcatatgatacattgtgattaactgtagtcattgtgttgcacaatcctgaacttactcttcctgtctagacgaaattttctatcctttgaccagcatctccccaaacccacccatttgttcatttttctttcttttaaccatatctcagttacttatcaatctgtttaaagacgtttttcatgggctgctaattccacaaatgtgagaaacacacacaggatgcctgccgtttggaggtggacttccagaagggaggaccggtattgatcaaagaattgtccaaatctgcagctgtgaactgacagagtcttgctctgtcacccaggatggagtgcagtggcgcgatctcagctcactgcaacctccgcctccaaggttcaagcaattctcctgcctcagcctcctgagtagctgggattacaggtgcactccaccacgcccagctaatttttgtatttttagtagagacggggtttcccccatgttgtccaggctggtctcaaacttctgacctcaagtgatccacccacctctgcctcccaaagtgctgggattacagatgtgagccaccgcacccagcctcattggtcatttttaaaatgaattattttttttcaaaatcagcatgtgagaagaaccaccatattgagcggcatatggagtgtttgagaaagcgaaagaacctggaggaatgtagagatgagtgagccccaggtcacagggacaggatgtggctgggaaaatgggcatgtccagaccaaagagaggtgcacaggtctgattctacctgaagataaacaggggaagggctctgagaaaaaaaaaaaaagatttcatcttacgatgagatattaaatgaaaatttttgaatacaatttaaaaactgtggaaagtacaatggtcatggttgtgcttttgcaaatcgccagtccctggggtcaggaagggagcaggcagcagtggcatggacaggctgaggccggcctcggggagccacggaggggagaggggctgtcacctgggggtgatgcaggaaaagtcgatgaagagagagggaaagatgagaaaaatttagagtgaaatcaccaggactgggtgacatggtgcatccaggaggatggagaagaggatgagtgttcagagtctgccctttgtgactgtcacgttccccgccaagaagctgccgagtgaagtgtgggctcgtctggggaaaagtgccgggctcagccttggttgtgttgggtttgaattctcattgtggaaatcggtgtgcggagctgacccctgcactcccagggtgaccgcagcactactcacagccgccaagacctggcaagaacctgagtgcccaccaccaaatgaatggatgaggagaatgtgctgtgtatatgcaatggaatattattcagccctaaaaaaggaaggacattctgtcattcgcaacaacatggatgaaccagaggacgttaggctaagtgaaataagccgggcacagaaagacaattactgcgcgttctcacttatctgtggaatctaagaaaagttgatcacccggaagcagagtagaatggtggttattggaggctgcaggtgcggggcatgggagagacactgatcaaatgatacaaagtttcgagtagccaggacgagtgaatttttcagatctatggcacagcagaatgacagtagttcataataatttattgtatatttcaaaattgctaaaaggagatttaaaatattctcatcacaataagtatgtgatggggctgatatgttaatcagctttatttaatctttccacaatgtgtacatacgtcataatatcacactgtaccccgcaaattgcaattatttgtcaattaaaaataaaatttttgaaaataagaaaagcaaaataagacaggtggaggatgcgagagagaactgggtgagggttggttatgcattttacatttggaagagtttgcaatctagggtatatttaaagggatctctccaggccctctaagaatcaacatcactcccacccagcactgcccttggggtgacagaggggactgggaagacgggacgaaggcatgacttaccctcctgcgtgtggatggtctgggccaggcagagcactggaagagaagccccagtgagaaaaatgcccagtgcccagtctccttacggggctgctgtcaaaagggggctcgatggagctggggggcattcagcatttcataacgaccaagccaaccctcctcgacatcactgtctccatgtaatccttcttgctgcaaaatggtttcaagataaatcccaaagtctcctcctccaaaaaggctcctgctcccccagcccttcttaaagctgacctcatccccacacccgggcccctgtttttaggacaagatcttctctgatcagacttaggccccagggagagcagcagggcagtcttgggaggaggaggacactttcctccccagaatcttctggactagagtcaggcttgagcagggaattttccagacctcccgaccccctttccagcctcccggctgcctccaggactcacctaggcccaggagggcggtggggtggggagacatggcccaggtcccagcagtgcagcctggcctgaggcgcaccaatgcaaggacagaactctgcagcagacacaagcagacaggatgtgctgcccgggggcctcctgcctatggggcttccacagcaactgcctcacacaagaggaagagctttctgtcctgttctttccacccttcccactagtgagacgagagggagggccttggtttctgaaaaatgtcgcttaccctaaatgtcgcttagaggcagatgaccgtaaactagttaccagatgtgtcagcctctttctaaatctatgggacaaggcagaataaaggtcgggcaaccaattgacttggacgccgtcccaactccacaagttaacggtcgcagctcttgggcaagacgttacaaaactagaagctgacatttccttgtattacaaatgggagccatagaaatccttccccaagtttttaatattgtgatctatgctaaaatcccgacaaggtatttaacacgttaaaaatatcctacaaagcatattatttttttaaggagactattggtgaggatgtggagaaactggatccctcgcataccacagtaggaattaaaaattgggcaatcactatagagaacagtggggaggttcctcaaaaaattaaaaatagagctaccatatggtccagcaatcccacttctgggtctgtatttaaaagaaacaggccaggcgcagtggctcacagctgtaatcccagcacttcgggaggccgaggtgggtggatcacctgaggccataaattcgagaccagcctggccaacatagtgaaaccctgtctctactaaaaatacaaaaaattagctgggtgtggtggtgggcacagctacttggaaggttgaggcaggagaatcgcttgaacccagaaggcaggggttgcagtgagctgagattgcaccattgccctccagcctgggcaacaacagcaagactctgtctaaaaaaaaaaaaaaaatcagtatgtcaaagagccgtctgaactcccctgatcactgcagcactattcgcaatagctaagacgtgaaaaccatctaaatgtccattgatagaataattgatatagaaaatgtggtgcacacacaggggaatactattcagccttaaacaaggaagaaaattctgccatgggcgacaacacggacgaaacctgaggacatcacgccaagcgacgcagaggcagagaccaagtactgcatgatgtcacttacaggagatctgcaaagtcaccagagtcacaacatcacagcagggaatggtggttacgggggctgggaggagggggaaatggggagttattaacaaacaggcctagagatctgctgcaccacatacgacccatcgtcagcaataacgtcttgttcacttgaaatttgttaacggaatagacctcatgttatttggagggcccggaggaagacaggaagagaagggaatgtttgaaacttcttagagatggattaaatggttgtgaccaaaatgctgatagtgatgtgaacagcgaagtccaggctgacaaggtctcagctggaaataaggatcttacttggaactagagcgaaagccacctttgttacgccttagcaaacaacgtggctgcattctgtccatgccctagagataccacgccagggtgtctggcggaagaaatttcttttctttttttttaaacggagtctcgctctgttgcccaggctggagtgaagcagtgcgatctcggctccctgcaacctctgcctcccagattcaagccattctcctgcctcagcctcccgattagctgggactacaggcacccaccaccacgcccggctaattttttgtatttttagcagagtcggggtttcaccgtgttagccaggatggtctcgatctcctgacctcgtgatccacccgcctcggcctcccaaagtgctgggattacaggcgtgaaccaccaagcctggccaagtcagaagaaatttctaagcaacaaagtgttcaagtggcatggcttcttgtaccaacctaggctcagatgtgggagcaaagaaattacctaaaggtagagtttatatttaaaagagaagcaaagtgtaaaagttcgaaaaatttgcggactagccacatggtagaaaagaaaagtccgttttcaggggaggaattcaagtaggctgctgggcaacgacttgctggagaaatttgcataactaagagggagtcacgtgctgtaccaaaacatctcatctaccccataaatatatacacctactatgtatacacaaaaattaaaaatttaaaaacatatatagtgacatgagatgtagtgtgaaatgtcattaaaagatgagtttgcatcagaatagtccaaacgtttcaaaaacattccagcatgatcactgccttgctgaccagtcttcctcctgagacgtggtgacagtaatgatcacaaacttggatctcgtggacagacaggggaattcaagctaaaccctggtcctcaaagagttctgcatgttacagtccctggtatatccttccaatctaatccaattttctgtgagtccataagacagcaatccatctaaaaaataacaataaaccaactaaaactgcttaatataatatgttaaagattttttaggccgggtgcaatggctcacgcctgtaatcttctcagcattttgggaggccgaggtgggcagatcatgaggtcaggagatcgagaccatcctggctaacacggtgaaaccccgtctctactaaaaatacaaaaaattagccgggcgtggtggtgggcgcctgtagtcccagctactcaggaggctgaggcaggagaatggtgggaacccgggaggcggaggctgcagtgagccgagatcgtgccattgcactccagcctgggtgacagagccagactccatctaaaaaaatatatattttttttaattttttttttttttttgagacagagtctcgctctgtcgcccaggccggactgcggactgcagtggcgcaatctcggctcactgcaagctccgcttcccgggttcacgccattctcctgcctcagcctccccagtagctgggactacaggcgcccgccaccacgcccggctaattttttgtatttttagtagagacggggtttcaccttgttagccaggatggtctcgatctcctgacctcatgatccacccgcctcggcctcccaaagtgctgggattacaggcgtgagccaccgcgcctggcctaattttttgtaatgcctaagagatataaaaactaagtgaaggctatgcagtcaaaagttaaagaaagatggagtccccagcctcaagctgaatactgaacctggagctcaccttgatgatgatgaattaactgagctttattttcatggttttgtaaatcatgaggacaaggataaagtgcaggggtacagattccaaaagcttccacctcatcataagaatgatttcaaatcactcaccaacttctcatggttgcaaggaatactacatttgttttgaaacttagcattgaacatgaggccaaaacacagtggctcctgagaatgactttcctgcttctgactcttcttttactggcataatggtttctatgcattagattatcctccctgcctcttttcactttaggtcttcattagtgatttttattcagctttatcaaaggatcctttgcacacaaactgcatccacttaatctgtgcaattcagtgaattctgacagctgtgaaaccaccaacatatccaagattttcttcactgctcagaagattcctcatgctcctttgcctccatgtggccactggttcctttttgatatgtatttgttgactgatttatttatttatttatttatttatatatttattttgagactgagtttcactcttgttgcccaggctggagtgtaatggtgcaatcttggctcccgggttcaagcgattctcctgtctcggcctcctgagtagctgggattacaggtgcgcaccaccatgcccagctaattttgtatttttagtagagacggggtttctccatgttggtcaagctggtctcgaactcccgacctcaggtgatccgcccaccttggcatcccaaagtgctgagattacaggcgtgagccactgcacccggccgactaattcattttttaaacacacttcttacctgggaataaatttaaacttgcaaaagagttgcagaggtacagagagttcccatatgcccttcatccaggtccctctaatgttcatgctttacacgaccccagcacatccgccaaaaaaaaaaaaaaattaacactggtacaataattaactgacaggctttctttggatttcatcatctttccactaacgttctttgcctgtgctgggatccaatgcaggggcaccgtcctgcatttacttccctctctgttaactgcagagaagggtttctgttttcctggttggaccctgattaatattcccctagtatctgaactccaggtgcccaggaaggttggggggcaaggatgtgctgcccactggggaaggagtggctggcagaatcgacatccgtctgttcctccacaatccaaggtcacagaacacatgggcagttattctgggtttttccataagaagggtgatacagagctgtcgttgttccatattatgaggacccctccacctttgcattcctctaagacctttcctctgagactctcctccaagctggagaagacaagctacatgcttatgtccaaggcatgctgcagattcagcatggcacagctccctcactcaaaaacgttacttgatgtgggatgcacaggcatagagtagtgattctcacactagactcagatacatacacaatatttgcaacttaaattaaacaccaattaaatgtcaagtggaaagacaacatctacagaaataaaatgacacaagatgcaatgtgaaatgtcattaaaagaagagtttgcattagaatagttcaaatatttcaaaactattccagcacgtcactgcgttgctgacctatcttcctcctgagatgtggtcgccgtaatgatctcaagcttggacctcgtggacagactggggaactcaagctaaaccccggtcctcacagttcagcacgttgcaatcctgtgtcgttccgtccaatctaatccaatctcaaggaccccagttcctgagcaaccctggcttggctcggccaaagggaagcgtctacagaatctgagtctagaatgcccggaggtctgtacttcttgctgttttcaggagattcaactgcaaagccctccccaagtcatccacattggctcacgtttctgtgccccacccttcctgcctgggaggacccttcttgttcagccaaaaaagcaacctgagggtggggtggtagcagggactcacccatttctctttccatcttctgtcgcggatgcaaccctggaaggaagacctcaggacgatgatcatcttcataggattcccgacctgtgcctggctttgtcctgaatattagccttggcagcctggcctgggctccgatggtggatgaacttggctttccacgggctgccacctccagcctgcgctgtggagagaccagatcctcggaacagtattttaaccttgtcctcctttcccttccagggtttaccaagacatagcgggtgtcatagatgtgaaaaagcttctgctataccagggtcaggaacggagcaaaactgaaaaccgcacaggatgtggtctgccaggtgccagcatcacagctcaaatccttaagaagctccagccgcaggcacggaaataaacagcttctccctgccctgtatacgtctccgattttacccaggatggggctgaggaagcaacacagattcccaaacgttacttttttttttttattttgcttgagagccaaggcaatattagacaagccttactccctaattagtgcctgacaagaaccatatctctgtcccaatccttctattcaaagtaggcacaatttgcttttaccaaatgtaaaactcatgtcaaagccatgctgtgagtatttacaccagagaaatcggcaaatgctacacgtcggggttgttttttgtttttctttttgctttttttttcagagagctgattgtcaagactttaccagcacactgctggtaaatttccaaaggccaatttaaagaaatttttttaacagaacatgtaaaaaaaaatcaacgtgaagtcaacatgctccagggaaatcagacaattgataaagcatgtctatttctgtagtgtatactccagcctgtttccccctcctacctcaggtaccgtaaccagcatctgaagtcttatattcaaatttcccttgcacttttgtaaatatagtgttctctcatcgatgtacctatttggtgtgtatgtatatgtgtgtgtatatatatatatgctatcatttaaaaattgtatttatttatttaaggtgggtcaccgaggctggagtgcaatggtgcaatctcagctcactgcagcctccacttcccaggctccagcgatcctcctgcctcagccttctgagtagctgggattataagggtgtgaccccatacccagctaatttttgtatgtttagtagagatggggtttcgccatgttgaccaggctggtcttgaactcctgccctcaggtgatctgcccgcctcagcctcccaaagtgctggaattacaggcatgagctactgtgcccagcctcgtttttaattttagtgcaaagtatagttttcaaaacaatgtttgcaatgtcatcaaatatagaatgagcacgcatcaatgtcttcttaattcattaatgatgaaatcatcattcaaaattcctgtctttacccaaatatttagcttcttctgttgctcttcatttgttcctgcgtttctccatttccactgggatgatttcctcttgtccaagccttttattctggcaaccaatgaactttacactctttctatagttttgccttttccagaatgtcacatagttggaatcagacagtggatacgccatttgggcgggcttatttcgtgtagtgatatacattgaactctcctccacatcttttcatgacttgagagcttgtgtcttcttagcatgggataatattccattgtctggacacatagttaatccactcacttactgaagggcatcttggt

SEQ ID NO: 313 - DNA, 12265 bp, Homo sapiens
  source 1..12265: mol_type = genomic DNA
cggtgtgaatgttggttctccatcccttcccaatcacttcaactctaccctacccataaggtccccggcaaaagactctcgattccccacgccgagtagccgggctaagagcgcccaggacactgggaacgcaagggagcccggcaaagcaagcagactgcggaaagagcttggccacccttctcctgccaccccccagctctggcctacccagaggtccctgggaaataaggattgggtcccgtcccacatatcttcactcccataagcagctgctcaggctggaaggccctggcggccggagagggcagaggcgagcagaggcataggggacgaagcgcgcagggcacagggcgcgaggcgctgggtgcaggggaacccagcagctgcgcctaccttcggctgcctgcagaacgctgacctccagccccttaaacgtcttgctggcgagctcctccagcgcgcacagcggcgaggtctgcgagagcagcgcgcggcccgccaggggcaagccgccctgcgcgtgcttgtccgcggcggccagcaggtgcgccgccccgcacagcgagtaacttctccgcacagacggcttgttgaggatgtcctcgatgctgaacggcgtcagtggcttgttggagttggcaggcggaggcaggtggtccagcgggctgcgccgccgctcctcccccggcgccgccttgccgtcctccttggaagtcatctcggccttgttcggggtcccggccggggcggctcgggccgcggggacccagcccgcgggcagctcgggcgccggacggcgcgggcaggcagcggcgggtggaaaggaggccgcactgggcagggcgcgggccgggcgcggggccgattagcgcggcggctgaggaggggagaacagcgcggggccccgggaagagggcgctgacgcgggcgccgctgctgctggggcttccagcaatccggggccggagccggggcgcgctgcgcggggctccagtttcgccaaccccggtgctatttaaaggtgtcaggtggctcggcagtggctcctggccccgggtcctggcggccgcagttggaagagccgaggcgagggcgccgatcccggactgcgagggaggcggagagacggggcaattgactattgctaacaagttagccttgatcgcggtgtaatcaattatctgcagcggcacttctttctctttctctctcctttctccctttttcctctcttctttgcctctgttctctcctcctgttctcgctctccctccctccctctctcttctctcttctctgctccccccttctctctccttctctccctctccctcgccctctctttcactctctgtctgtccaatgcaggcggctgtaagttgggaagctcattaattagcgggccgggggtaggaggagccggctggaattagcctgcctaatgcgcctgtcagtccgggcgctgcgctgcgttcggcccgagctgtttgtaaattacattagctgctcctttattgcacccgaacctcgggcgactgaaaagccaccgcccccaccccaaactgcgagccgcgctcctggcgcacccgcctcccgccggcctagctgcaatgaccgcaccggcccgaaggtctcggtctctccgacccgggatgtggagcccgaaagagtggtgggaaccccagcccgggagggacgcggccgccgctcgggccaggtaggaccaggagcccgggtgggccccgctgccacccagagtggactttgcggagctgagatcaagagcccagcgcctctacctctgaccctcttgcccctcaccccactgcctgggcgacgcgcctggggagagggaatctgaagccctcctgcgctggcccgcaggaggtcagagccggctgcgcagccttgggtgggcgacgcgggaagggggtggaggaccccaggggttgggggagggggctagtcggagagctcagccttctccacgcggagaggcggaggagggaattgttggcggctctggacgcctctccccggcctgattccgaagcggccgccctacctcctccggcaatcttgctcactttcctccggcagccgctccccaggctggctggggccaccaacggcctgatgatgggcgtctgaagagtagccaggccaggtgccggggctaacggggccggctccgtgcctccctgctgcgctccgcccgggccccggccggggccccgctgccggccccgcctagcccagcgcccggcttgagtgcatggccaggccgactccagctgttccggatgcggggcgggggcccggcgggagccaggccgcggctggggctttgctctcaggaactcgcagggaggccaggcttccagttaggctggggctaaagaccttagggcccgggatctgtgaatatcgggagaacatgttgtgtgcattgttacttgaaggtgtttgtgtttttgaatgtgtgtttgtgtgtgtttctccatgcgtatatttgtgtaaatgtgtgtgaacctgtgggtatataggtgtgtttgaactcagctatttctttcatttccctgaggcattccagcagggctgtgccctcaggccttcctgtcttgctaccccattctgtttatgtggggccactggcctccttactaattttccatttctgcccttggagaaaggaggggaggacctagagggggttggagtccagggagaagggctgttcccctcccacacacacacagccctggccctggctttgtttgtaaactcctgggtgggcggtgaggttgggcattgggcagcaccgcttggaccagaaaagggcccagagaggccaaagtgaggatttgtggcccaggccaagggttggaatgggaagattaggatttcttgccccctctcccctcatatctaaccccagagagggagtgagctaagctgggctccggggcgggaagcaggttctttctctggatgcctcagcgtagggggcctctgcacagcagagataggtttcatgatctcaccttcagttgtttgtttggaattgtggctggcagctctctggggtaaaaaggacagtgtagggagaaagggttcttgtttggtgccccagttctgtgaatgttgggaagaacccctaccctctaactcatctttgtcctgcattttcggggtggcagtaagcgagtggggggaagacaaatgctcagaggcaggattggtgagaatgggaatcacagttccctcagagctgcagacccactccagggcagacctgtctctactcttctgcgctgccctgggagccacgaggtgctgctgggcctagcaacagaggagtcagagcctagagaccagcagaggcggaccggtgggagagggcgttggggagctgaatctgggtggcttggaagctctggggccaagaggggtcagtcctctcacttcctgccctcaggatcccatttcagccttttcctgccataaccccaaccccctgacccagagcctcaggcaagtgaggctagcagggaggcagggaggcccctctagatccaggaacaaggacccttggatcccaatagagagaaagagagagagagagagagagagagttcctcccatacttccacacccttcctgtcctcttcagtctttgcatcgcatctggtactagcccacaggataggactttaaggacaagccaatcccctgctgttgcccatctcccagatcctcaagaccagcggagttcagggttactgggaagctgacaggaaggggaacatgaactggggagcagaggggtccctctgcttggcgtgttcttaatgtcttatcctgctggctagtactgagatctttagtcttcagccacaccatgtcaaaaggaacacgacgtctcacaatcatctgctgagttacctccaccaccaacaccaaacctcttcttccctggctgacctgtacctgctgtccaatcctatggcttggctcttttgacctaattggttggcctcttggttaaacacacttgggcacaccatatggctggggtgtggagtgcagtgtgaggtgcagggatgtggggaagtctgtggtatcaccctgtgttttgttgttttgattcacccagatccccttatccaggccacctttggaaaccagcccacctgctacaccaaccttttcccaacaccgtggtcccacccctaccttcgctgctgaaaaaccgcattgtgtgggggtctggaatcttctggactcctgggaccccaatccgcttgcctcttgtacccctcttgcagagcaatgaggtatgttttgggtttgtgtactgacccctacctgcctcctctgccagacctgagggcaggagccttcctctgggtattccagttcatctcggaccttcgaagtcctaggagacaccgggctcccgctgaatatcggttgaatgactttccatagagcaaatggggtatacatgattgtgcaatgtggaggggaatggtttgggcccctcagaggagtttagagattaggaggattccagaaatgagtaacacagggtcagtgggggtagagccagccctgacattctgggctccaatctttctgcccaatcccctactgagcccccatgctggggcaaggcagacactctgggggtctccccacccccagtcagctgggccagcatcttctcacctggagctgaaagcagctgattcccagagtctgctccacagagggaatacctgtcttcagagcataatctatatgctaccatgatcctcaattcctgtttgctgcttaaacagccagggtccaggtttattctttctcagtggatagggaagggatcattctgccaaaaatctgctttccctcagtttagggaatattccagacaaagaagagggaaacagcatttcatgaattgccacaataaggggaccctgcagacccaaacaaaacaggttaaaccttaacacaggagaagaattcgcttaaacccccaaagactccattggattcactctggattgttttggtacccccattcatttccagattatttgtataagcaccagcattgactctcaggccagagttcctttagagaaaagggtctgacactgcttgaaacaagttaacttggccagcagtgcggatcattttactgttgttgttgttgtcccatgaagacctgctactctgacactctgtgtggaattcagagtgtttcttctcctatggaagtggactatgataaacggcctcctgccacccaggctaagtcaggactgcccacttggtttttacattttgccctgggccactgtctgcagtaacagcaacaataaccatgacaataaataccataagcccttaccttgtgcctggctccaggctaagagttttattcatttcatttattactcacaatctttctaggtagctatgctcttaccccgattttacataacaggaaaatgaggcccagagaagttaagtaacccatccaaagtcacacagcctgttttggagtgatcaggattggaacactgtccttttgttttgttttgtttcttattcaagtctgtccccttaattcctgaaccagggggttcttaaccagaggtcccccaagggctctttgaatgggcttcaggggctctgtaaatctcagaaatttatatgtgtacccaggtgggcacatttttctgggagcaatattatataacacccaggattctcaaagcgggtggggatccagaaaaggtaaaggctggaatcaggccactgtagggaagggaggcaagccactggggaagggggatggaagcggcctcctcccaggcctggggagcagggaggcagctgcttcaaaattcaggctgggctccaagcctgctcctggacctgccctgctttttctggccacacccagctcttaggacctcagctggcaggaagacgtggggcaccatctgagggcaggacactcctttggtcccctccctgattctccccttccctacttcttttgtgagctgaattccttcagagcactgtgacaaggtgaccataccacatgcaccagcctcctccaggcactgtaatcctgcttggaaggagcggggagtgcttgccctttggaagtactgggggacatagacagaccactgagtgacagagacaggaagggaggagaagagacaagttcccagagatgctcaagtcctgggtgcccactctctgcagcctctagaacagccttctcttttggttccaagcttttgctcccctcatccaagggttgggatgatttgtgtcccttcctttcctggcacctcctgctctgtctctagtgctcaactcatttcctgggggaaaccttctctgccctgttcagctcctctgcgctccttagcacattcccctggatgtcactgtcatattgccaagaatgtgttgctttgtctgtctgtcctgcctctctctctccatctgttgtgaacttgggaaggaaggacctgaatcacctctccatgcccctatgccagcccagcatacaccaaggggtccaagcatttgttgagtaaataaactaaataaataaacaagggacaaaaatggagccagacagggaacttagcctgtgcctcagagagaggaccaggggtaggtgtattggttttgccagctgcctgcagatgcgtgcggtgctcctactgctcacaccaatatactcagaggggcccagaagcctcattctctaatgctttttggctatggagtgagtttcctgggttgtggacccagctgtggtggtgtggtctgacttagtaatgaacttccttcatttgctttttttgtttgtttttgagatgaggtctcactatgtcacccaggatggagtgcagtagcacaatctgggctcactgcagcctcgacctgctaggctcaagtgatcctcccacctcagcctcccaagtagctgggaccaaaggagcatgccaccaagcccagctaatttttgtattttttgtagggatggagtttcatgatgttgcccaggctggatttttttttaaataggattaaggccgggcgcagtggctgggcctgtaatcccagcactttgggaggtcgaagagggcagatcacttgaggtcagcagtttgagaccagcctggtgaacatggtgaaaccctgtttctactaaaaatacaaaaattagccgggtgttatggtatgctcctgtagtcccagcttctcggaggttgaggcaggagaactgcttgaacctgggagttggaggttgcagtgagccgagatcgcaccactgcactttagcctgggtgacagagcaagacgctgtcaaaaaaaaaaaaaaaaaaaaaaaaagaaagaaagaaagaaaagaaaaggaaaggaaagaaagaaaataggattgacccccccatcattcgttgggcccagaagcagagaggaagaatggacagaagatgggaggtgatgggcaggcaggagtggcaggaaacagacacccacacgccactccagtagcccaggggtctgtgaagaggataaaggaacctaagtgagcatgtgtgtgtgtgttgggggggggggcgcggtgtggggggagagtctggttctgttcctgatggaggtggcatttgagttgaactttgtaaaaccaggagcatgtaaataggtgcaggagcagggaccatcctggaggcaaagggaacagccgagcacaagcccgaagatgccaccctaagagaggttccagagttccctatagctcctccctctgttgtcctggcggtgagctactgggtaagggtgaaacccttagtctcttgtttatcggcagcaggtctgcagcctagagccaggggctgctggactcctgggatggctatttacttatttatggggtggggtgaggggtggggatgggatgagagaggctgctttcctgggcctacaattggagttcccttctccttgccatccccagaaactccaagagctgaccctctgtcttactaactcaaacggcccagaaacatcaaagtctgaccaaaaaccgttaatggtagtcagctccctccctttcacagaggtctcactactgtcggggggcgccgggcgcaggccgggcatggggcctgagcttaggccaggtggaaaggtggaaggacctagtggggacagacgaagagaccgaggagccgcccgcccggctaaatggacacaggaaaggcctgagtcaggcttctcataataaataaactgcacgtgaataattcagcagtcgcgcgggggccggttgcatcagcgccgccgccgccgcgcggcgcccaattccccgcggaggggagtagccaattaaggcacttgaaaagggagtcgggtggaagatcccccgcccaccagtatcctggatttacccaggtcgagttcagagagcctccccggtcccaaccccctcgggccccatgggtcagggggccgcctgctgggaagtgctacctcagctaagccgctcaggtgtcccgagactccgggcaagggaagacaggcggcgagacggagccagaataagggatgcggacgtctgacctgtggaaaacccagcatctgcagtgcccagccgcacagggaacgtgggcggcgtggttccaagcacagtgaagacgccaggctcggatctgtgctcagagccgggatccctccgggctgcttcgtcctggccaggactttccttgccctgaagtgaggcgccagggaagctgcagggccctccgccctctctgaactcccacgtacttgggcctctcccagcctttcttggacctgtggaagcaattcctgcaggaccagactcccctgtctccccgcggccccctaggtacactccgtaacttccgaaaccttatttcgtttgagcgaaacccggcccctttggctcttcccacttcccacaagtccctgggttcccgatcctgagggattgcattcatcccatctcacacccaccaacgctcaatccctccagttcctccccagccccttcacttccattaattaggtcgactcccttccttcgccgctccctcctgtccccactcagcctccctacacctatgcggcgagcctcgggccaagacctccgccctggctccgccagtcctgcgggggccggcatgcaccagacctcaaaagggatcttcacgggaattccgcatagccagatcccaagcctccagggaggccaccagccctcccccatcttcttcttcctcctccgtctcctttcctcttccctccgcctctacgtatttctttctattcgtttcttttcgtttggtgaggtgccacccgccacagccctgtcccctagggagaggcctggactaactttgccgtcctcgtggccttagcccggactgtgagtctcgagcggcttccgagaggcagctcgggtgtcttcgcagagacagatgaggtgggctggcgattccctagcctcagatggctctgccaccagccagctctgtgatcctgggtaagtctttcaacctctctgagtcttgacgttggtaaaaggcaggagatttagagaaggtgttgggagactaaatcttttcattcgtttgagaaagggagtcgcctgtgttgggacctaaggaggaagtgaggttcttgagaattctagatctgaaatggccgtttgttttaacgagtattttgggagcagctgataactttttatttttatttttattttttacagccgatggggtgccaggcattagaaaccttccctccaatcctcaccatgtctccattttgccaaagaagaaactgaggttaaggtcgcgatgctctggccagcatcacaggtgggattcgaacgcagatggggtttggagcggctcttgtgtttaagccacacagtctgacgttagacgggtgaatccagccctcgcagggcctggagtgacctaagccgagaggagctgggctgaatctccaggcgttcctttctttctgccctaggaaagctttgaaattcttattttcaggtaaacgattttggcagtgcccggagaaagatagaagtaagacctaaagaggaactttccgcatgttatgggagagcccctggggcgaggaggcgagggcagccttccccaggccaagggagcagccatcgctcttggatctgtttttcctcaagcgtctgtcctgtggggcctagtccccaagcggcagtcctggacctaacgggagaaggggctgggggaagagggcgcacccccagcccgggacccacagcagccctagccagtcccccactctctccctctgtaggggcctctctctgagatcgggtcctcctcctgcagggcagcagagtggaagccagggcctgggaccctctggctgggcaaggagggactggagtccggctcccggtgaccccgtccccagtgccagcggtggggtcgcctgtggcggcccggacaggccacgggtccctctccccaagtcccattacgttgtatttatgtttcattttatagtttttttttcctcctcccttattattgtctcactctgggggaggcaaaggatataatatattcatctttattataccaaatctgtgtgaagcatttaataaaacgctgtttccacacagccagggatattagtgtgagctatccttaagttaatgctcctggactgagggcgccgctgccacagcgcctgctgccggcgggtcgcgggaagcgtaggccctggccgccgcgctccccgcgcgggtccaacgccctgggtgcccttctcgcctgcgccttgaagcccccacgcccatcctagcgcgtctctctgtgacctctcggccgccagcctgggaggaggggtttggaagagccgaattcaagcacccttcctctcccctgccacaccctgcatttcgaatccgctgtgggccttggcttgcatctatgaaaatgggaagaattccatcactgcctccctctcagggatcttgagaggccgaagatgccttgaaggtggacaggattttttaaacaggaaagaaaaaatcgagaatttgtaaggtcaggatcaatgagggccagagagaaatagagaggctgcaggagtggtttcaggcaacacagagcgagctggaccccaggcgagcagacagggtgcaactccagtttgggcagaacccaggaggtttcggcatgcctgggcctcaccccagcccacgaagacagctgaacctagtcaggatctcggcctgtcacagttggccctctcataatcctccctctaggtaggaaaatagtctttttaagtccagttttacagctagcaaactgaggctcacaaagatcacgtggcttgtttgaggtgaacaaactaggaagtagtgtagctggtcacactgtcttccagactccatgcccctccccgcccccattctccagggtttttctgtaaaccttacattctgccttctacacacgcgcgcgcgcacacacacacacacacacacacacacacacatccctacctggagatgcccatgggaaggagaaacaccctcattactttctatatccaggcccactgctcagtgtctttcagagcccaccacctggcttcttatagggcccagatctgggcacaccattcttacttaggctgcttgtacctgtgctgtaggggagagggagttggctgtaaccaggcaaagccaggcagaaggagtcatgcaggacaggcttgaagtgggcaggtgagtctccctggctagaatccatactctcctaggaatctcagtcttcctctgcccccatcaccccatccctgggagtgggggctgcacaagctcaacacacatcctgtaggctgctggtcagagctcctttggagacttaagttacttgagaaatctgacagttcccccctggggctggctggggaggaggcacagactgtgtggcagggctaggactagggtgaggcatgtgaggtgccatatttaaggaaggcatctgctctcagctctgtgtgtgatcccttaggttttgtgccgtgggcatctcactcgcctcaccctagtcccagctctactgtgtggtctgggagttagaatcaagtccagtgaactgctgagaggggacaggga

SEQ ID NO: 314 - DNA, 437024 bp, Homo sapiens
  source 1..437024: mol_type = genomic DNA
ctggaacgcgcccccagcctcccgaaaccgcccccggcctgcgggcagcgagccggctcctccgggcgcccctgcagcgtactctgcgctcggcttggagttccccgtgcggccggcggtgggcgcgcgccacgcgggcccgagccctgggcgggagtgcggccccgggtcccgcggcctcggcgcccgcgcgcctcccccactgcccacccccggcctccgggcccgccccccgcaggggtcggcgcagcctgtgagccggggacccctgagcccccgccacggcggccccggtacccgcggcctggccgcgcgccgggtccccaccgcggagtgggaaggaggaggagagactggaggagttggagacagacacagccgcggcgcgcagtcacggctggagacagacggcggcgacggcggcgggaggcgggacactcccccctccggcgactggaggcgggacacctccccggcggccgcagcgccgcgtcccctctctccccgcgctgaggctgcggaccgggcccggcgggattagcaggcgagtgcgttggccctgcccgctccgcgcgccgccgcggccggccggggatcccctgcaagccactgagccgctgccgccgctgcagccagacaggctgcgggtgcctgggaaagtggaagcagggcggggagcgcgggggaggcccgggggtgaggtcctcagctcttaaagaaccccggcgcgccgcgctccccgccggcccgccgcgcgccccctgccgcgccccgcacagcgcccctccccctggccagcagggccggtggccgcggagccgcactgcgggcagtccccgcctccgctccgggggggcggcccaggtgagtgcggacccgaggtggccgcagtggtcggggcttctggcccaagttcaccgctgcgctccggagggaggggtggcgggggactcgggaaccggacgctttgggaactggacgtccgcgagcctgcgccgtcggctggggccggagggagaagctgggcgccgagcgcgcgaggtctgtgaggcttggtccgggtgggcttgccggtgggcacggcggggatccggggctggcccgcgggcggggttacgccggtggagggacttcgccgacccccaccccgttttctgtttcctggtgccctggggcgcagggtgtcccgcggttgcaagactgaattctgcaccgcccggaggccaggatgggcgcgcggatggcagccccaactgtctccgcgcccctaggcctcggcgagccgtggcgggcagggactggaggtcagcgggaagcgggaagatcctgcaggacctgaccggggagtttgcgggaaggagggggcgggccaagccccgcagcccctcagtcccgcatcctgcaccgcgcgctccccggccccggcccctcgggcccgcttcacccggcgtccccccgggtccccccgcgcgcgttgacgtcggtcgcgggaccgcccggagctcccggcattggctgggaagtcgattgtctggggctgctgctgttgcacttaggctgggtctccgagccccggaggaagcaggcgtgtgttgaatttctctctgcccctcaccttggaataaacaggaagcgacaagcacccagcccggcccggcacttgcctttgtgaaggggtctgccctgcacagcctttaggaagcttcctcgggaccccttcccggtgcgccgccccgggtgggcctgggggcgcgccctgtgagtacaccggtggaagacagtgggttcggtttaggttaaatcgctatcgtggcggagagggcatttgcttgtttaaacttttttttttttttttttaattggaaaaggagaaggtttcccgatgaggcagaggttttcaggacgacagggacgcatggtgggtgggcggcactgggggaaggcgcatccgagagtacagcgttcttgggtcacctacctggagggacacctcgtcgccagtcagggcagctagaagctctttaaagcaagcaggactccttagctctgcccaggcacaggaatggttgctgtgtgcccatagccgcatgaactagcatgatttttgtttttcccccaaaattttttaattagctagaattagataattttgatttgcttcttttcttttcctctgtgtcttggtctattcccttctctttttctcttttctaattattttggcatcttctcatccccggaccagcgctgctttctaaatgttaattaccattgcaatacatatttattgagggcctactatgtgttaggcattgtaggatgtgaggtaagagtagctgcacagaatgtgggttctgagcgctagtattagtaagttatttgcagtagaggtggatagagatggtgagcagcattgactctcaaaaatagggtcctatggctggtaaggaggttggtgccttctcgaagggctagtgctgggaagcttccttttaaaaacggccctttctgccggtttggctagccaagaatggcatcctcctctctgtatcttccctggagcttcaggactgagtattgaatgacagagaaggttctgcaaagtctgcacagggagactgccattgcatcaagtcatgtctgcattctgtatatggtattgtcttttctagtctttaactcgagtgtgttgtcatctgtaactctccctttgtactctgcacaattcttctggaatatagtctttgtgttcagtcaaggatcagagtgtcaaatctgagtcattacatagacaaatgaggatgtctgagtattacccatgtatatttattgaattatatttggtttcccatcaacccttgaaatgttatttgatggacctttctaagcagtgctttttaaaacagggggctaacttccttatgatctttgaaagcttaattctttttaagagcttcattttgctattgacattgaacacagtgttaggaattagggctgggaatgtaaatgccagtaagggatttgctgtaatggaattgtagctaccttcctcccttgttttaaatgacctctctaatttcttaacattctgctgttacccttggaagggcttgccattgttggccatggtcctggttcgtgtaggtttgtatttacattggagaagactcttcccggcaggtttttagggctgtctcttgaatcctctcatgggcttggtttgcaagaccacaatcctgcagtggaacgcagccagtgccagctgcttattaagggattttgtgccaatttgttggcacattatttgagactcctgcaccccaccctactcccactggagtatatacatacatagacaaatatttattttcccccaactgctgacagtgttctaagaatagttttcttgcctggcacgcggagagcaagggcccgtctgcagaggtgtttacagtttgggactgtgctgtagtcttggttgacttagcagcctggcagaccagcctcatagctcctgggacgctctctgtttttgctctgggctgctgcaggggtaacctccctgactgatagggaagcacagtcagaggagagtgacttttgctccttgtgcatggtttctggcaggcagtccagcagagatccctgagctcctgacgtctctgcatgtagccagcataaagtctccttgtggtgggtgggaggtgactgctctacgtcatcacgtaaaaccaaagccacctcagggccctgggcaggaattcttgaaattgtagactgctctgatctttctggtagtccttgccatgtttcttctcatctttctttggaatctgggcttatccagtctctatgatgtgtccttcttcctgtgtaagagttagtagagaaggaaaaatgttatccctcaagaagtgataaaacattgtaaaagaagagcgcaccatattaacctggaaaaatttttggaaatagttaacagaatgtatagcggcacatggatattaaatatgaatagcggcaaaattgctatgtagtccaaaattattcttttctttcttccttcctctctgtctccttccctctctccctctgttccttcctttttttaggtctcagaaaaaaatctcctggaagccattattttctgatgtcaaagagactttctgcctatatgaactgtgttagtttagaattacatcttgacctatattacgggtgtacatggaagatgagtcttaagtttcaaaataggaatgcaaaggttctgtctactatttgaaaatttaggccacaagacctgccactttttagggacattttttggggggcattgtttgcttcattgttaggcagagaaaggactgaagctagtacctgtactattaattatgctgaaaatattgggtttgaattttcagttaatgtcatttttttccatcacaggaggaattgaaaatgatgtctgtattgtcacatatccatgtgatttaagaatggattgcttttcttttgagttctcactaaaaatggtactttggccttttaagctgtttttgtgaagacttttctttccaccaagcttgttttccagataggtcttggagattacaaagaacatagatataatttctcccttgattggcagctgcgagctttcccggacaaaaataatgctgcactgtgccaaatggttgacttttctagaataaaaactctaaagggtatgcaaaaagtcctctggttaatatattggcattcccagaacccactaacactccggcagcctgccagactccacttaacgaggacacagaatgtctggctcaatccccatgagcagacgggggtggggtctggatgtccacaccctttattaatttttaatgactgtacttttgttttgcagattttcctctgtacccccttctcaaccgtctcctacaacgtcactccccccatccatttatttactcatttacttggcatcggaaaaatgtcgagctgttcagggttaaggatcctgctgagggatcatttctgtttgcatgggttcttttgttgttggtttttttttctttttcttccttttttttttggaagaggaagagagaaaaggaacagaaaagatgacaactatttttttttaaggatgctttattgtctgctggaaaaagagaagcatttacgaaactttaagtttgtcagacagtttatgtgacagtgcaagttggtgcttgccaagctccagacagattgttaatgttacatgacagggataaataaattaccgctgtctgcaacacgcttgcactgcaaacgcactctgcagccggcggccggctgggcgccgctcatgggcctggtgtgcatgcagctgcgcagagggcctctgcctgccgcctagaattctgtgcctcggttcggaaatgaaaagggtgtgccttgcttttatttttggctctactgcagggcagtagaatccaaggagcaactctgtgtcctttattttgctaggctgctccgcctcctcccctgccctggccccacctctggtccacactcccgttcttcctctgagcagggaaatcaggcacctagcttcttcccaggagacctcaactttgttcttagctgcccagggcctaaagtatctcaaagccaagtttcaagctgtttacagttgtgttctttctgcaggtgcagacactgagaacaaattgtctacgatagataaggctgtactggcctgggagggcctgggtggcactccttgggcataatgtactttcatctgggcaatttggaagctcagctggcagagtgacaggtgtaatgaacttaatggtcttgccctagttgtttgcggacacacagctcatgttacaaagccacctcataccaggggcccctgccaaatgatttgctcttctctttgtggatgggacttggggactggacgactgagtggcgttaaggtagggaagggggtgggtgtgagtgatgtgtgtttgccctcatctgctctgttcctaaaaggacctagagagtctcctgaaagtaggccttgagagaaagaaattcttcccactcacactggctagccatcctccatgccaggtgtcgcgaggaccctctgcagatgtgcttcgacttcctgcctctggggtttgcagaatggcaggcaggctttttgccacactgtgtggcttcctggtacactgctggcctggctgctgggattcttcagaagagggctgggccggcaatgcacagccaggcattgttctcggagtccgtggccccaggggccagcaacctgtgcacagagctgcaagggaatttccattggaaagtctctctgcttccgaaggcagccgctggagaggctgtaggaggccaggctgctttccgaagggctccctgacctctaaccagggcacgtgggcagataataataacagcagctccaagtgcttctgtagcctctcctgtgtgccaggctctgttctgagggctgccatacactgattcactaatctaatcctcacagcggccctgtgacatgggtcctcctgccatctgcatgttacagagatgtcaagacattgcccagagtcaccaacttgtgaataaagggtggagcagcctgggcagtatcgctccaggttctgggatctgcctctggagctaaatgaggtgggacctgggtcagggattcttcatctgggaccacttactggcagggtgccattctcttcttgtccccatacaggtcccactgggactctatccagccagcaagttcagggttttgtccttcttgcctccgtgctgtagccctccctccccaactccctcccctgtttttaatcctaatctctgctctctgcctgttttacctgtggcaagagcctcagttatgagcactggaccatggcagctttgtctctgtccaccttatcccttgagttccttgagagaaagacaaagcaacagtcagcaggagtgctggtattgccagatatttcttctgcactggtccttaaaaccacttccatcagcctccccatggcacctctgggtgtagcctggtggagtgtgactgcccggttcctgggagcagctaactgcctgggtctgggggtgtgtgctgggaatgcccccaccagctgtctcttcactcggagggatccagttcatcccaggacaaagagcactatagtttctttctttctttctttttttttttttttttttttttgagacggagtctcgctctgtcgcccaggctggagttcagtggcgcaatctcggcccactgtaagctctgcctccagggttcatgccattctcctgcctcagcttcccgagtagctgggattacaggcacgtgccaccacgcccggctaattttttcatatttttagtagagacggggtttcagcgtgttagccaggatggtcttgatctcctgacctcatgatccgcccgtcttggcctcccaaagtgctgagattacaggcatgagccactgcatctggcctacagtttctttaaaaatgaaaaaaagttatcccatctttaagagtctctcttttttttttttttcttagatagagtctccctttattacccaggctggagtgcagtggcgtgatccatctcagctcactgcaacctccgtcccaggttcaagcgattcttgtacctcaacctcctaaattgagtagctgggattacaggcatgcaccactacacctagctattttatgtatttttagtagagacggggtttcgtcatgttggccaggctggtttctcactcctcacctcaagtgatccgcccgcctcagcctcccaaagtgctgggattacaggtgtgagccactgcgccaggccaagagtctctgttttgctccatgaggtataggtaaatgaatcatgcatattgacgtgtacgtcctatgaaatgttgtccaccttggacaagctaaatctttgagattgtgggacctaaagggagtacccaagagatgcacatatcatgggcctagcaggacagtcagctctttgcaaactggtccacggtatcaggcaggaaagggtgtccctcacagctcttgagccacccccagcagctgggatggatgctgacccctatgtagatactaccaggtgtcccacatgttgcagggcatttctgagcctttgtggcatggggctagcccggcatggggctgattaagttacggttgaggaggtgaagacctctagagagactgtcctggtctgggccctgtccactctgtcaacagctctcagtagccacgcattgtcatgacccaaggtgcaaggcctgtcttggggtagctgctcctagcagcatctgtgggacaaataacgttttcttttcctgatacatgtgtactgaagagaattaggaaatagggaaagaaggaagaaaataaaaatcactgaaattatctatgatctcactgctagagatgattagtaggttagtagattccaggtttattaattaattataaagtcatttatgtactttttaggaagcttagcattctttcatgaatatttttcatgtgatttaaatattctccaaaaatcctacttctagattgtataatattctattctatggttatattgttatttttttaaaaccagttttaggacattgaggctgttaccggttttctctgttataaatatgattgcattgaacgtctttaaactttttttttagaaatttattacataacttgataatttaaaaaaatggagatggggtcttgctctgttgtccaggctggagtgcagtggtgtgatctcggctcattgcaaccgccatttctcaggcttgtggcatcctctgccctcagcctcctaagtatctgggactacagatgctgccatgccttgctttttttttttttttttttttgtagagaccgggtttcgccatgttgcccaggctggtctcaaattcccgggctgaagcaatcttcccgccttggcctcccagggtgctaggattacaggcgtgagcccctgtgcttggcctgaacattttttaaaacattgtttgggtagattcttaaaagggaaattgggggctataagacttttaagggtcctccaaaaatattgccagatggggctttcagaatgggagaggcaacttagattcccacagagaagagggtgactgcacccttgtcaatgccgaatattatttaaaaaacctttgcaaatttggcagtaaatgatatgggcacatgacgtttaaattttctttcctatctttttattttgaaaatctgactttgtgtcatctggcttatcgatgaaaagagttttgctgtttgctagaattttgttaaggccaaacatcataatgtcagtggatgatctcagtaggtggggtaagacctttgtgctttttaaaatttgaataaaataaaataaaataaaataaaataaaataaaataaaataaaatagaattaaattctactcaggtaggttcagggcaataaacattctaataacatgtcttttaaacaaattataggatacgatgggcatagactgctcttggtcttcccccagcctcctcatcctccctctttaggggtagccttgaacttgcaatggagaatgagggccaggagggggtggagtcagcacctggctgtctggatagccccaccataccttgttcagtcgcttctcttcatttcaaatgatccctattggacctcacactctttgctagtcttgcccctaaggatgcagacagaaaattcatgatgggcagacagaaaattcatgatcctccatactccattcttgtgtcgtctgtggaggacctccacatcctctgcaaatgtgctaaagttttctgctttcctccaaggcatcagcccttccagagttgcaacaactatgaacagtgcctgacctcttaagctgttgctcctaaagcttgagagagatgaaaaaatcactttactaggtggtgatgaactaattaaagacagtctttcattgaggggttggaagcagctggaatggagggtgcttaccgtgctggagggagcaagatggcaccactttctctagggctggtcatgatcggtgtggttttgttcacaggcacctgagcacatcaggtggggagaccctcatgtactgtgcaaggtgctcacctgctctttggtgtatgctgggggtgcacttccacctggcattgcctggtggacagtgagtgggtcccacaggacctggtgggcccatgtattagtccgttctcatgctgctatgaagaaatacccgagactgggtaatttataaaggaaagaggtttaattgactcacagttccacgtggctgaggaggccttgggacacttacagtcatggcggaagtggaagcaaacatgtcctacttcacttggcagcaagagagtgaagtgcagagtgaaggaaggaaaagccctttataaaaccatcagatctcgtgagaactcactatcatgagaacagcacgggggaaccactctcatgatctattcccttcccatgaggtccctcccccaacacatggggattacaatttggattacaattcaaggtgagatttgagtggggacacagagcctgaacgtatcagcacagttctgtgttttgtaccaaagctttcaaggaggtgcctaggtgcgtgagcccaggtactgcaggtgcagacggcagaagctcagctggtgatgctgtgccccatctccctgggttgagactgcagactgggtccttctcagctctgcttggcctgccatcagcaccacactctgtcccaggtgcacacctgccctcacctgtggcagtgctgaggccttggagatggattccaaaaggctggagatggtatgaggcctgcggagtggagatggagtgtgctgaaggctgctaatggggtggcagtcctccagtggtctggccggtggggtccctcagtgtcttttggggagtacgcctctgccacagtccttggcggttctccattttcctcagtgaggtggtggctctgatgtcactgtgagggtgcttgccattgacccagagggctttgggtgcctgacaaatccaccttgtgtttgttactggctgaggtgtgcagagctgaccgatttctgtctgatttgaccttgctgtttggcttgctcctgcaacacagtccctgctttcctagtggggacgggaggccttctggatacaatgtgtgcaggacttgaggaaatgtcggcagttggttggctcggttgaacatttgtttttctgctactttggctatgaagataaatcttgacccctaggccaggcacaaggctggagtttgagaccagcctgggcagcatagtaagaccctatctctacaaaaaaaatgttaaaaaattgtgcccctaaaacacttagctttccttctattgggtttgaatatgacattcaaaattgtttacttctaaactagacgtcctgggattttgcattttttcatctgaagagtaatgtaaaaataataaatgttgtgtatgtacagttacaactagctatatgtagtaaatttagtccagaaaaatcatgacatttgttttctgataaagttgaacttggaatgaagcggagcagttgttatctgatggactcttggtgcattaccctctaatgtgaatcctcatcctttggttgctgtaacattgtatgttggagttttatagctggggcacatttatgtgtctgagggaatggcttctgttctgccatctgcatggaggaagctgtccccattggacccaccgaggaggcagcgtccaggctgcagcgccagcctgtgtgtcagctgccacggggtgactgcatcatccgtggtgtccttgggacgattcgggtaaaggcctcctgagggcttgccatgggcagttgctcagttatccttctagctgtccctcctgggcccctgtgctgccgggccccttgaaggctgtgcaacctggggaaggtcactgactctctaggtctcagttcacctctgaaatagctgtttgcccaccttgtaggtttttgagaggattagataagatcatatgtatgcagatcaggtgggacaggccagctaccacagcgagtgctcagtaaaaggcagctcgtgagccaagtgtgtactcgtgagacatctgccctgcactggcacagtcagagacccagttcccgccttttggagacatagagaccaaggagaagatagaatatgtgtggtggaagcaattagcaagtgagagtggttttacaatcacgtcttgaactaagcagtttttcaagaaaggctttagatgtggaggagagtgaggcccccaggcccagaggtggtggctctgacgcttccttcgctccctcccttccctctccttctactctttcctcctgtgtgcatttttatggagcactcaggacgtccacgcactaggcatagataaagacatggctttgtcgccaaactggtggaagacaggtgtgcccacggttgccacacagggctaacaaccataccagggagacagaggaagatgtgagtagacctgctgtctcctggcttcctgagggctcaatgtactttggtcaatcaagggagacttcatggaggaggccaaatgctgttgtgtgaatgtttgtgtgtcccagaaactcctcaattgaaacataactccactgtgatagtattgatagtattgagcgatggggcttctaggaggggattaggtcacgaggcttctccctcatgtgtgggattagtgcctttataacagaggccggaggagcttgttcaccccttccaccactcgaggactcacagaaggtgccatctatgaagaatgggccctcaccacacaccagatctgccggcaccttgatcttggacgtcccatccaccagaactaggagcaacacatttttgctgtttctaaatgaccccattgaaggtatttcgttacagcagcacggctggactgagacatagacctcgggctgagacttagcaaaagaacagatttttttttaaggtgaacaaacagggaaagagtaatctagtgggttgcagcgagaaaatattagaacgcatatacttatttttactccatttttcaaactttgtatattatgtgtacaatgtactattaccatagtatatgtatataatttataatttataaataaatatacatgacctgtgtgcttagacatttttgcttgtaggagtatatgcttcagaaaattgggggcccacaggcgggcagtgggaacatatgttaagacagggggagggcagggcgggccatgcatggctgcaggtgggggaagaggtgggagggtgtctgcgagtgtcatgggtagatgctactgcttacagtgcctgaaatttcaaactcaaactctaaattacttttgtagctttcagttgttgtgaactcaaaatccacagaccatatcttgctcctttgccgccctgactctcctaggctcctctttctggtccatgctatctgaaccctccagggcgaatcctgacacaggtcggggagggattgaatacaccagtttggtgatcagaaatgttgataggactgctttatttgtgtggagaaatcttccttaggagggtgagattatttattcatgctcggcgcagggggacccttttagggcccacatgcatttataagaatggagacttgtaatctggtgaagctcattcctgatgtccagggtgctgcggggctgcagggatgagtgaaggttctttccctgcctgcatggaatgcgcgccacgggcagcatcgtcttcgagttcagaggcgtatagatgtctatgggtgaggcaaaaggcaggtggtatgggaggaagcgggagggagaagggcaagaggggtctggaccggttttgcttgagaagaaatggcagtggacacatggctcgtgtgaaaggtgggtgcacgcagacaggccagaggcttttgggagcgggagtgaacctgggcacggggcgctgctcttggtgagcatgtcgggtggcccttgccctttgggtcaccattcctcctgattgcggcctgcccgagatcgcgtgagtctggttctggtgtggagcgtttcctcccatctttgtcgaaaaccaaatcaaccagccacgaatggtaaagaaaaacaagcccattagaacacctaccttgatttcatatcgaattgtttgcagtggggagctctgtctcgaccacagtgctttaatagttgatatttgtttacatttcacaaaacgcttacatttcatactgcattcagttcacgacaggaagccaggtttatcactttcgcatgggaataataatgccttctatttgcaaaacgtgtaactatttaaagcttttcacagacaacatctaatttcatgttccttggctttaaggaacaaataatcaatgaaatgtacatagaagtataattaatggatttgtttcttcttctctaatgtggctattagctgaatgaggaattcaggccagagtttatgttattttaatgtgtgaaacctaattggaatgtgatgcccaatggttgtccaaaccacatggcaggctgttttctgaaggtcattggtcccagggatggcagcttggtggctgggcaggcacccacctagtcgatgtcattttgggaggtcaagggtatagcactaaaaactgaattcgaagatacacatagttacatcaaggggactgagggggcaccccgtgaagctctctcctggtgggccatgcaggatggagtgtggcgcgagtacggtgcaggctggggccaccgcaggggcctgctctcatctcctccctgttagaggagcgtcttctgggcgctcttgtgggacttaggagtatgtcccaggtcctgagcagtgcagagacttggcctggtgccagcagtgaggtggatctgccagtgtggcccctctcctgtcccactcgcctcccgcctctgtctgtggcctgtgcccctttttgcctggcatggtttgagcttctgtcctggtacagtttgttcggctgtggatgcaagttgacttcagttctgtttctcccctttcaacaaaatcaccttccttccccgcgtggccttgtccgggggctgctgctgccccgtgctgtgctccacaagcctccgtgtaaatcgccttccttccctgcgtggccttgtccgggggctgctgctgccccgtgctgtgctccacaagcctctatgtcacctcgtgctgccgcatcccttccccagctcagctattcactgttgtctgcagctctgactcttccgctgtggctgccaagtcccctgatcccctgcttgcgttccaagtggaagccgtgtgcgccgttcacactggcttcgcagcttcctgctctctcctccgcagcccaggaagcgccacctccagccatgctccctggaagctgcgtgtgggagaggcgcgtgccagctgtgatgctcgtccgaactcagctccggacccgaagctggcagcagggagagaaggctgccacgtctgctggctctccctggtgtggtcctcctggttccctgaagggaacaggagccagcgtcctcatgaccaaggcttcagctcattgttaaaatgattaggtggcaggtgaggcgctttctgatctcccctggtcatgagttgtgtgatcaatgaggactctagacgatggcagaggatctgcttgtcgccacacacagtgcgttagggatggagcttgccaccagtggcgccacctctttgcaggcgcctgtcctgaaggacgtgagcgggcgaagtgctcttgggtctgcttggacacgggtcactggccgctaagaaggcaaatgccatgccgttcagatacgttctctgctactggatgatgtagtgctgctgtgatgtagcaaatgcattggcttgttgactgttaagaggtggcaagacatcaagggaccctctggcttgctcttgggttggcaaggttggcagaggggcccactgctcagagcccagtaagaggcgggacagctgtgtttggaagtgggccaaggaagccggcaccctcttattggaaatattctccatcctgtgacctgtttgtcgctgtctctggtgctcctgtgacctgtttgtcactgtctctggtgctgttttatggaaaccttctctaagcaaagatgtctttgagtatttgttccccttccctccctgggtgatgcagcctgctggtaaggtgtggccagcttcagagcccagaggaacggggtctctcccttagctgtcagtggagagaggtttctgagcctagaaccttatactcacagctggagagcttagaggcagagttttgtcgcaactgttgagactgattatgtatttccatagaggacctcggcccagaactccaaaccctaggctcctacacctacctgcctaccgggcatctctactcataggcacctccaagccagcatgtctaaaactgaactcttactcccccagctgctcctccctgcccctcagccccccagccctgtcactccctcactgtcccattccagtcaccagcatccttgtctgcccgtggttcaggccacacatctcagacacttctttcgtcaccttttcccatggcccagtgcatgtttgaaacctatttgttctgcctccagcgttcgtcccaatatgatcacttttcactgtcaccaccagcagtgctcgtgtgtcctctctccctgggtttctgcggggcctctgaccgggtgctgtcctccccacccgcgatggtctggtctggatgcagcagccagtgacccttgtaatccctgatggcatgccctgtgcccctcgggcctccctcctgctgaggctcctcacccacgtaccccctcgccgcacaggcctctgtggttgccctacccagaactctccctgggtgcgcacattagtcgcctggctttgccctaggaggccttccctggcccatgtgtctcctgcacggggcctggtcattgtgagctccaggagggcagacaatcgtcttcttgtccctgtcctggcccagcatcgggctgccaggactgtttgttgaataaacagatggactgtgagcaggcacctgtgagcaggccaggggaggatggtgggcaggtccacagactcgtaggcctggatggggctctggactcctcccttctgccaacttctgggtgggcaccaggtgtgggtgtgaggccatctcacctgagcctccgtgggttgggacaggcctcagtgcaaacagaaagtcctgcagaaaggctgaagtatgagcagcagtgagagagatgagccggggaggctgagcaccttccatgagccccgccccaccccatggactgctgctcacctacattacattcttattttactgttttcctctaagtaaactacctaccagaaaccaggagaagcaattgtttttcagaccaacttttgcccttccattctctcctcccaaatttaacttgctggctaaatacattttggataaattagttatttatttgcttagaaaccaatttatcaagctgtaaaaaaatcatcagattaggttggcacggtggcttatgcctgtaatcctagcactttgggaggccaaggtgagtggatcacctgaggttgggagttcgagaccagcctgaccaacatggagaaaccctgtctctactaaaaatacaaaaaattagccaggcgtggtggcgtgtgcctgtattcccagctacttgggaggctgaggcaggagaattgtttaaacccgggaggtagaggttgcagtgagctgagattgcgccattgcactccagcctgggcaacaagagcaaaactccatctcaaaaaaaaaaaaaatcatcagattattaaagtttattaaattcatcatatgtagatgctttctctttagacgagatgtctctatcataaccttgattctcctaagctgttttcctctgttcttgggatcaggaaaagttcaaagtagagaaaattatggtctgtgaatcttttttccatcttttcaaagaagactaaatgttcgacagctacctggaagtctgactcaccctccaggcatctgactgtgcttttattctggtattagttttgttgccttggatttaaaatccacaaggattgtgaaaaccaagtgcggaagaaggagaaaaaactgaaaaaccccccacattctaaatagtggtgaggactcctagcaaattcattcctattgatggcttttagcctgtgtaatagaccactagccatgttgcatatgcgatcggctttggttggatgagtcgactttatttccctcccagtctgaggacacatctgcagtcctgcccctgggggaagtgcacatccagccctggggtgggttgcttttcttgcaggctgggtgctgatccttgcctccgttaggaatctgtttgaacctccacccggagaacagactggaaggaaatacaccaggacattaaaaatagaggtcttggcatatagtgctaaggatggtttaaaaaattctgtcttttcatcttttccatattttctacaatgatcatgtgttcctgtttttataatgagaaaattcccagttaactagatttgctaagggtgtggaataaaaagtcactttctgaaaaattgtggaaaacaatttgatgtgtgtctttttaagcattttggaagcgcggtggagttgctatggggatagcaaggtttactctctacagagagtggttccatctggcacccgtcgctcccgagctgggctgggcagttctgtgcagagcagtttctcgttagatgtggaaacagttacacagagaagcactgttccatcttttccccctggaaccatcattttgctttgatctaacaatagaaaaactttttttttttttttttttgagacagagttttgctcttgttgcccaggctggagtgcagtagtgcgatctcggcacactgcaacgtctgcctcccgggttcaagcgattctcctgcctcagcctcctgagtagctgggattacaggcatgcaccaccaccccaggctaagtttctatttttagcagagttagggtttctccatgttggtcaggctagtctcaaactcaggtgatccgccctcaggtgatccgccctccttggcctcccaaagtgctaggattacaggcgtgagccaccacgtctggcctagaaaaacatgttaaactcctttctgtaccctctgcttcctctgggtgctggcgttgcctgtgtggggctcggtccgtgtttctcagtctggagggtttctgagctgctgttggagtgggggtgtctcctgcacctggtgttccatgtcggactttcagatcacagttggaattaattttcttttgcagatgtgttgacatcttcctctgaggttacgttttaattcccctttgctttgtccctggaactgtggactccctccctccctagtcttgcttggaaccagcgtggttccatctcagtttagagatgaggattgtaacattccataagggactgtgcttgggggcataatgtgtgcaggtagagttctgttttatatttaatggagaatgaaacacagtgacttaagaagcagcaggtgtctctgtctttgtgatcttgggttatccctggaggctccactcatagaacgcttgctaggcatgctggcttgggctctggaggccagcttgctcttgttctgggctgtggcctttggccagtccgagtcctgctccctcatcttgaaaatgggatcatgacatctgcctgcttgcagggttactctgactgtcagatgagatggcgcaggtgcccgctgggaaatgcaggggactaagtgcatcaccccacgtcctgggcactggcagagtcactggtgtcctggctgcttcctcctgtgatctgataggatgtggctctctgaggccaccgtagatggtctcttagttcccagagcttctagttcatatacttagtaccaaggaaggttctgtggttcatgggcttgtggacagtgactgccgggtggctgatttgttcttgcattggagacagaggtgataatttcactcctggtcccacggccaagtggaactggggtgatctgttcagtggaaaaagcagttagttcgaagacattcagggaacgtggattcttgttcctagctcggtctccaagtagcattgtcccccgagcaaccaaagatccattccctcagtgcatacaattgtgtgacagccctgcaccagtcactgtgatcactcaagacctctggcctcagtttccccatggagaacccccttcatggaggcattgctgtccagcagtttgcatgtgttctttcatttgacccatgtaattcatttatgaggttgggaagtgtagtgatcagtcccattttacagatgaggaaactgaggtctagggaatttagcaccttgtctgaggtcacatgctgttaagatctcgtctctaaaatgggaggctggggtagagtctggtggcctcctggatgcccaccctggttcttaaggtcaatgtgtctgcctccttgcgaagtcacggtgcttgggctgattgtgaaggaaatggacagtggagtgaggctgttcctagccatccttacccacaagcttgctctgaaaatccacctaaaaccccaggaactattgggaactgtaaactaacagcaggtgccagaatatctgcctttcccaagtctggagggcatgagatcacagagccatctaagcatgaacccaggatttctcttccttattttccagtattggaactggagacagattgctcgatgactggtcgtggtttattgtaaaacgagaaggagccccctcttaaaaacattctgctgttgggctggtccccttcatgcattgcctcttgttgatagattttttgctcaactggaaggatattagaggtgcctgtgccacgcaatattttatgattgatcagtgtcttgaagcactgttggatgcacctgatgccttctttatttgggctgtcagtgttcacacaaaaggaagactttttacatctactctgtgctctttctgtaataagctgggttattttggagagcaggtgggagaacgtgcagatgtgggactcagcacccacagaactgaggggtggtgtggtgcaggccagagggcgtggactgcagagtcctgccagcctgggttcacatctctgtgaggtttgcaccaaatctgggttacttttaggatcctggagagactcaatacctgggaggggcctacacataggcagcctctcccgggtggtgactacgcctgtgtttctgtgtggaaatgtgattttataatgtcacgttcccagggagctcactgagatgcctcctgctcctactcaacagccctagcccctgttcctgccgaggttctggtgggagaggggacattaagattgctgcttgtaaggccaggcgggtggctcatgtctgcaatcccagcacttgggaggctgaggtgggcggatcacctgaggtcaggagttcgagaccagcctggccaacatggtgaaaccctgtctctactaaaaataagaaaaattagctgggcgtggtggcgcacacctgtaatcccagctactcagggggctgaggcaggataattgcttgaatctgggaggcagaggttgcagtgagctgagatcacaccactgtactccagcctgggccacagagcaagactctgtctcaaaaaaaaaaaaaaaaaattgctgcttgtaactgcgggctcgagagaacatttgtgacccatgaagcctgcggttggaggggcctggcgttagggagaggacactggaaatgttaatgcagctaatccagtgagattagcctgctgagctcagggatttgagggaacaaaggggagtgcaggggccacttagaagtttaaacagactccctctcccttttcacctacgtcttgtgtgaggatttcaatagctcctaaatgagcttgcctgaatggctgtggcactcttttaaattctaattagctagtgaattaaccaggatgaattttgattagtcagaatgaattacaggtattaatgatcatacagtcttagagcaaatgaaagtagcagttgtccagagggggcttgggccagccatccggctggagagaccttcagtaggctcagaacagctgcgctcattcactcactgttccactttcttgtaatgcctgcaccagtcacagtgtggactggggaccagacgcagatgccctggctgtccttggcgggcctggaaagagtggagccccaagttgccggctggcaaacctccagctgtggcccgtggggtttgctccatggtggcctgggccacgcaggctgtaccagccatgagatgccatggagccaaaggctgcgactgtagctgtttgtgctgcagccaacctttacccagttcctgactgctgtttgtttggtttgccatgggtacttctggggacctcctggcagcatgctggcccgtgcaactctcctcatgccagttgtagggtccctgttcctgtttggccaaggaagggatttcctaagtgtatacatatttatttagctttgccatgttttggatggccttggacatagaaactcattgcacattagttaaataactaggccagcattctgaaagacccgactccagacctacttcggtgatggagatgggcacatgcagggtcagggtgctttgaaagagtcacacattcaccttccaacagagcagcctgaggcttccctagtcttgcagggtcaacttgctgaaagctcagcccttggccccaaaggagctctgaggccgcaggcccagagccccgatgtccccgtgagctggtggcagggaagcggaaaaaggctttcacaccgcctcccccacatatgctcacagcctcccctgggccctttcttgcctctcacatggccatcctgtgggttctttggcctgggaggtgctgcttcagcctccctcggccttgaggtgctccaagacagcgtcagcacctgggctagaggtccgtgctgccctgtgcatcctcagagtttgactgtagtgtgcatgtgtgcatgcatgtgcgtgtgtgtgcatgtgtgtgcttgtgtatatgtgtgcatgtgtgtgcttgtgtgcatgtgtgcatgcgcatgtatgcgtgcgcaccgttattttctaatggactgtgcaggcatctgttctcctcatggaccaggaactcagtgatcagggactcccctgtttactttgatattccagctgccctccagagcgcctagcacatagtaggtcttcagtgactgccagatgagaggatatttaaatgagacggcagctttggagggatgacaacagattgtggtctaatctcacgatttttgcctgagagagaattggccctactcgaggcgggctttttttttcttttcttttcttttcttttttttttgagatggagtttcactcttgttgcccacgctggagtgcaatggtgcaatctcagctcactgcaacgtctgcctcccgggttcaagcgattctcctgcctcggcctcctgattagctgggattacaggcatgtgccactacccggccaattttgtatttttagtagagacggggcttctccatgttggtcaggctggtctggaactcctgacctcaagtgatccacctgcctcggcctcccgaaatgctgggattacaggcatgagccactgcgccaggccaaggcgggctttatttgtgtctgttggacacctcacatggcacctcacagggcgctggtttataaagacccaaaccagtgtcgagttccatgctggccccggcgtctgctgtgtgctttcgctgtgtgtatacatgcggaagttcattccggaggcttccagggtagcctcccgggtgctgcagcgggtctcccgctcatcactactctgtacacaatgtcttgatacgctgaggattgaaatggagcagtgatcctgcctcaaggtagacagcaaaacccaggctatgtgggagtcagtgtggtaggactgagggcgtgcctgagggacggatgcaggggcagagagagcagcaggtgaaggctgggcctcctgctgaaagccggtattgctgagactccagggtcagccttccagctcctcctcctgactgaccgctggcaatgtaggggtgactgtcccagcctcctgctgcagggcgctctgccgtcagtagagaatcctcctctgtccccgcggtcccctccccgctgaacagcctggatcctgctttcacagggacatgcgtgaaatgggtcctgcgccgtaattactcctgctggagaccgggattgcaaagatgactgtcatgttgtctcgtgcatcttacatcttttactgtgattaaaaataaatgtcgtggggttcacgtcccacagacccttatgtactgcagaggtcaaactggggcgggtttctcacacgcgtcatcacgcgaggccagtgtccgtcggggtgtgtgtctacaagcacggggcttcgtggcctatctttatgaaccctccagggtgatgtgaagccagccacaaacaaacacacacatcatctgaaaacaataacaaaagatcggggttctaggaaaaagagaaaatagtttaacagagcttcattaaaccaagaacgtgcttctgacttgttgacctactggaatcgcttgttttcacgtctgcaggaaattcatcaaaacaattttgtctaggattccagtatttcaagttttacccggtcacgtcagtgcttgatttgatcatctgcattttccaattaaaggttaagattttaggaagctctttgaagaggttgtttaattcctgctggtactttggtttcaggcctggagctgtggccggggtgatcgggtgattagtggaatccaactaaggtaaggcaggcaagaccttcgtggacttcactttgatatggaaaaaccactttcacacacttactaatgatagatttttagaacaatagtaaagaggttggtaatattttaccctttaaaatcccatgtagtctgtatagtatatagaaaaagaaataagaactaaatgcaaatgtggtattttttttgcaagccactctgcattgttattttttaattaaaaaattaaaaaaatagatttatggggtacaagtgcagttttgttatatggatatattgccttgtggtgaagtcttggcttttagtgtaaccatcacgtcaatagggtacattgtacccattagatgtactgttttacttaactctaataaaggtaattttgaagtagtttatttaaatcttatccaacagctttggcctttcaggcagctctgaccccagctgttcgacttgggtttcagctgttacacagtgggcttatccacctacccatccacccatccatctgtgctggcaggagctttcccgggctgggtgctcttctccctgccggcctgctctgcgcctggcgcctgctctgcccctgtgccttcatttccacatctcagttctgcagcagctgagtgtcttggggctgttttgtatgctggaagcacttaaaggctttatgtctgactccagctgatcttagttttccagtcaggccatgttttctttgggagtgttttacagctggactttccaagggagtaggccacctttccatgggcagcatggtgtgggaggcagggccccttggaggtgagagccaaggagctgagttgtccccggcctcttccacttccagctcttagccttgggcacgtcactaacttctgtagagtggacactggaatatctctcaacctatgaggaggattaatgagacaaaatgtgggaacagcatttgaaactttatatcagcatccacccatccacccacccacctatccatccatctagccacctgtacacccacccagccacccactcgttcatctgtccttccatccgtgcacctacccacccgttcctctatccattcacccacccatccatcatccatccatccactcattcatctgtccatccatccatgcacctacccacccattcctctatccatccacccacccatccatccaccatccagccacccacgcacccgcacattcatccatcgatttacccatccatccgtctacccatccatctatcatctccccagccaccacctacccatccacccatccacccacccagcgacccacccatgcacccgcacatccatccatcaatttacccatccatccgtctacccatccatctatcatctccccagctaccacctacccatccacccatccatctatccaccatgtactcactcacccacccacacatccacccgcccacccactcattcatctctccatccatccatgcacctatgcacccatttctctatccatccacccacccacccatccatccattcatccatccatccacccacccacccacccactcatgcacccacacatccatctatccatttacccatccatccatatacccatccacccattcctccatccatccatcatctccccaaccaccatctacccatccatccattcatctatccaccatgaactcacccacccacccacccacccattctttcctctatccatccattcatccactcaccaatccaccatccattcatccatccatccacctacccatccattaatccatctacctcctgtccactcacccactcattcttctatccatccatctacccacccatccatctattcatccattcatgcacccattcatccacccatccaacccacgaatccacctacccacccatccattcatccacccatctgtcctaacatccacccactgatctactcattcatctgcacatccattcatcctgcccatcctccaccatcaaccttcctattgatctgtcagttattaaagttaattgccaaacataaatataaaatgttagggtaaaggccccaagttttctctgttacctacctacgtctctctttttgttattataattacgaatgaatccttgaaatctttaaacatctttattgacccatgtgggttgtattgtggttaatattgtagtcatttacgtttacacctgcaagtgttgccatcaaaagcttaggcctctccttccctcttcccccaagacacaccctgtcacagcacatccatatccacacacacagcaggtcttacttctgaatgttctgtgtggaatttgagcttttggcagagcttgtggattgacctcatggttgagatttgctgtcttcatggacaggtgggagtgttcattttaaagttaaatttaataaatatttagaaagcatgcatcatatgcctcattagcaattttgttaggtactctgggagaaacaaacaagcaagagcgcagaatcatctggtccgtctgtggcccctgcaattccgtgaggcactgcttcctctgcacatgaggttcctggggagcatgtcatctgccttattatggtcgactgcaccctctgtttggtggggggcatgggttcccctaagtgggagctgtgcctgagtcagcgtcatgagggaaaatgtggagaaacctcaggggcaaccattccatgtggagctcgtgggcaggagtcatcctgagtctgcaggacccatgtgtacctgggctgtacggatgcatgtgtgacttcatcccagcccctctattcttgagagcttattcagtatcagaaataatggggagacgaggtgagacaggcacgtgagggcagccgtgtgtagtcttgtgttggattcaggtgatatcaattttggaggcctgcctgaagtttttgctgagtttattccagcaggaaatactaccacacctaattaatcttcatacaggactttgccaattgctatgatatggggcattggcattattagcatcatcacttttcatatgtgaaaccgaggatcgggtagattaagtgctgtgcccaggtcagcccaagtcagaaggctcagggctggctctcagggccacatctttgatcctggctctctgtccgtctcactatggcccatgtatccctaagacatgtggaaagcagggtttctccagtggagggaaccagagcagacagcatgatcatttctgcttcaagggggcagaggcaattggagtttctcacatcacccagctcagaatggcagctggtggcctgcaggtgaggggcagggcccttgcagctctgccacctggtgtgcatgctggctgttctccagcctctcttcctcttgattttcttgtctcgggttgttgacttttgcttttggcctggtggagactaaggggaacagtgtgcaaagtgctgagcccgtgtcttgcacagagcatcactcggggctcagagcactgcagctattattactcctttctaaaaagccagtatctgcctggaattacaaggcaggcactgacagatgtataagtagatgctcaagagcaaattaaaaatgcattgttaaaaatggattcaatgtgtgaacaaagattggcatgaaggttgggtccctgtatttttagaggctaattaaagtgtgcgaacaacgataaattcagataacccgtattgcttgaagtcaccacaaagcattcactgaagagctaattgcagcctccagaggtttgggtggtctgcggccatcactgacttcaggctctgcctgcttttgcccatgctgagactgcactgtgcccttggggtccctgtgcagccctggggatctcgctgccctggcgcctggtgatgtgcattctggtgcatttctgcagtcctgagtttgggatagacagtaacaccgtcgtgttaccacgtgccacttgtctaaatcactcacagaaatctgtggtcaggtttctataaagtgcttgattggtgatgaggagatggggagtgatttatggcatgctggccctccagctattgatgggtgtacacacaccgaggtcagtgccatataaaatgcagataccacagcccctaaggggtggctggccagctgtcatggctgcagtcggtattggagtgggcaggagtctgtaaggaaatgtgatccatgggcttagaatcccctgttttgtcagtgtcttggaaaattggcctccagagatcaactgtggagtgcgccatgtcagaggctgtcttctcctgttgcgacatttagcagaccaggtctgcacacctgattttccattagtcacactagaaaggagaacatttgtgcttcataacctcagggttagacaaacagccctgcaggtagatcatgatcaataacaggagatctttgtaaactaggttaattttgttcctgaaaatctgcaatgtttttttatctacaagggtttttttttttttttaaatttcctaatagaacatgagtattcactgcacacagacacagtgatggtgggctaaggacaaaaaagaccttgggtaaactctagacctctacctgtcatgattagaaacatatccgttctcaccagataatcttttaaattccaaccaggcttgctttaggtgccaggaggtagtaagaattacaggttctgtttttagggcaacggcaggattttaaactctgtatgcctcccctttctgtcactaagccaccacttttttacaaaaagctttgttttgaaataattgtagattttcagaagacttacgaagattgtgcagagttcctatatgccctgcttcctgtaaaggcattaacatcatatgtaatcatggcacgcgtatcacaactaagaaattaacgttggtagaaaactgctaacgaaaaccatagacttgacttgaatttcactagttgttctaccaactaatgtccttcttctgttcccaggtgcagtccaggatgccatgttgcatctaaccactgctttttattctttgttctttaaataattttatttttaactttttattacggtaaaaatttcaaactctgtagtagagagcatgctagtaggtccagttgacggccgcccattttcagccatgttccgcttgtcgtgtgaatgaaggtggtcttagtgaggggcccagccctggcagcaccctccacgcacgcacagggtctgcaaagtttgtgcctggcggtgtgcttgtcttgcatctctagtcaccgtgttcttgctgatggcgctccagggttgctactgtaagcgcctgtgcttaagaactggatctgagctttccccgatttctgccacagttttcataggccacgggatttgctggagaacccgctcactctggagcctttagtcatgatgtccagttgagatttattgttcagtgtgacccagtggttcagaaaacctgtccaactgcacacagcgccgccccccgcctttttttttttttttttaaagacagagtctccctctcttgcccaggctggagtacaatggcacgatcttggctcactgcaacctccacctcccaggatcaagcgattctactgcctcagcctcctgagtagctgggattacaggcgtgtgccaccatgcctggctaattttggtatttttttagtacatacactgtttctccatgttggtcaggctgttctcaaactcctgacctcgtgatccgcctgcctcggcctcccaaagtgctgggactacaggcgcgagccaccgcgcccggccatagccccacttttttgagctgtgattgtaagagctggactaaaacaaaatgtctgacagaagaaaaactaccttatttccacatcatacttcccctcggtgcccagggtccagtgtcacctctggatgcccagtgtcctcctttgccctggcagagctttctgtttctgtgcctgtgcaggttattggctggtgtgggcacagcgaccaccccataagatgtgatgtagcaattgtggaatgaaccactggcctgctagtaggtttgtaagtttaactgctaagctactttacaccaagatgttaatagctcttagtgtttttaagtgttaactgcttgtggttatttacatttttgaagtattttattttaaaaatggacacataataattacatatttatggggtacatagtgatgttttgatacatatgtgtcgtgatcagatcagggtaattagcatctccatcatctcaaacatttgtcatttctttgtgctgggaacattcagtatcctcctagctaattgaaattgtatattatgttactgttacttataatcatcatacagtggtatagaacactagaactcctatctagctgtaattttgcataccttaacaactctctccctatccccctttccctacaacccttcccaacttctagtattcccttttctactttttacttctatgaggtcaactttttacagcatccacacatgagtgagaacctgtggtgtttaactttctgttcctggcttatttcacctaacataatgccctctagttccctctatgttgctgcaaatgatggcttttcattttgtatggctgattggtacgccatggtgtatatgttccacattttgtctctctgctcctctgttgtggatcacctaggttgattctgtatcttggttattgtgaatagtgctgcagtaaatgtggaggtgcaggtgtctcttccatatcctgatttcctttcctttgggtaaatgccgagtagcaggactgctggatcatatgggagttctagttgtagttttcagaggaacttctatactgttctgtagtgactgtaccagcttacattcccaccaacagtgtgtaacagttccctttctctgcatccacaccaacatttatttcttgtctttttgatagtggccatgctaactggggtgagatggtacctcattgtggttttgatttgtatttccctgataattagtgatgttgcacatttttcatatattaatatttgttaatcatttgtatgtttccttttgagaaatgtccgcactcaaattttctcattttaaaattagatcttttttttttttgctgttgaaatgtttgagttccttgtatattttgtatattaatccttcatcagatgcattgtctgcaggtatgtcctctgattctgtaggtcatgtttttactctgttgattgcttcccttgctgtgcagaagcttttaggtcgatataatcccatttgattatttttgcttttgttgcccatgcttttggagtcttacttataaattttttccctggaccaatgtcttgaagcatttccctgtgttttcttctaatggttttagagtttagtgtcttacatttaggtctttgatgcattttgagttgatttttgtatacggtgacaggtaggggtctagttttatttttctgcatatgcatatagttttcccagcattatttatttattttacgttcaggggtacatgtgcaggaagtgctggtttgttacataggtaaacgtgcctagcactatttatcgaagagaatgtccttaatgagtgttcttggcctctttgtcagaaatcagttggcttgtgtatatgtggattaatgtctgttctctctattctgttccattgatctatgtgtctgtttttatgccagtatcatgctgttttggttattatagctttatagtatattttgaggtctggtagtgtgatacctccaattttgttctttttgctcaggattgctttggctattttataattccatatgaaactttggctttttttttcctatttctgtgaagaatgtcattggtattttggtgcttaatagaaggaaataagtaaagataagagcagaaatacacaaaattgagacaaaaaacaaagatcaatgaaacaaaaagttggattttggaagaaataacagtattaacaaaccattaactagactaagaaaaaaagagaaaaatacccaaataaataaaatcagaagtgaaaaagtgaaacatcacaatggataccagagaaatataaaggatcattagagaatattatgaataactacatgccactaaagtaaaaaacctagaggaaatggctgaattcctggacacatgcagcctaccaagattgagccaagaagaaaaagaaaacctgggcagactaacaagaaatgaagttgaatcagtaataaaagtctgtcacagcagaaaggcctaggactggatggcttcattgctgaattctaccaaacctttaaagaagaattcatactagttcttctcaaactattccaaataaattgtatcagagataattcttcctgacttattctacaaggccagcataaccctgacacaaaaagcaaataagaacacagcaaataaaaccacaggtcaatattcttgatgaatatagatgcaaaaatcctacacaaaataatagcaaaccaaatccagcaacacatcaaaaagctagtacatgatgattgaatgggattcatcccagggatgcaaagatggttcagtatacataaatcaagaaatgtgattaaatcacatcagcagaatgaaggacaaaaaccacatgaacatctcaatagatgcagaaaaagcatttgataacctttagcacccattcatgataaaaactcccaataaactaggtatagaaggaatgtacctcaacacaataagggccataaatgacaaaaccacagctgacatcgtactaaatggggaaaagctgaatacttttcctttaagaactggaacaagaaaagaatgcccattctcaccactcctattcaacacgtactggaagtcatagccagagcagtcaggcaagagaaagaaaggacatccaaatttgaaaggaggaagtcagattatccctgtttgcaaatgacatgatcttatatagagaaaaacctgaagactctaccaaaaagctcttagaactggtaaatgaattcagtaaagttgcaggatacaaaatcaccatacaaaaatcaatattgtttctatagacaaacaactaggtgaaaaagaaatcaagatgacaattccatttgcagtagctacaaaaaatttaaaatacctagggataaactttaccaaggaggccaaagacctctacaaggaaaactacaaagcatcgatgaaaagaaattgaagaggactgacaaacaaatggaaagtacttggaagaagtactgtatggttcagatgaccatactgcccaaagaaatctacagcttcaatgaagcctctgtttgcattttaaggagatgatattcttgaagaaaaattgtttatcccaaatgcagagttcctgacttgtggcccattattgaggaggctatggtgcttttctccttggtcttcaaaacaagttagtcatggatatggaaactcaaccctcatgactaaaagaagcaaactgaaaagaatgtcatttatatggttctgtagatatatgattgtttggaggggacttgggtcctcccaggagaaacagtctgcattggaatgtctccttgtattagaatatatctcttgccagcttcattggtttttgtttgtttgtttgtttttttgagatggagttttgctcttgttgcccaggctggagtgcaatggtgcaatctcggctcactgcaacctccacctcctgggttcaagcaattctcctgcctcagcctctggatggagtagctgggattacaggcgcccatcaccacacccagctaatttttgtatttttagtagagatggggtttcatcatgttggtcaggctggtctcgaactcctgagctcaggtgatccacccacctcgtcctcccaaagtgctgggattacaggcgtgagcaactgtgcccggccttccacagttattcactgtgcacacttggccaggtgtaccgctaggtgcggggacccagggtgggccacagccccatgtctgaccagatgactgacctcaggcagcctttgatgcacaaatgatgaacttccaattgcttaatgttattacaattacagactgatgacgaggttggtgctgcagctgcaccctgggaactcggtggtgccccccaccatactgggcacggtgggactgccgcagatgtgatggatgacaagggttcctgccagtgagaggaatgaagatgctctttgcttctgtgaggtcaaggcctcatttcatgtgacatgcagaaccagcctcacttgccgtcggccctccacatccacagctgtttctgcgcagggatgtctggctctgagcccttctgcggagcagtgttgcgctgttcctagaatagtgtccttgtagtctcgttaggctttgcttctctttgtgtcttgttgttttgctggttttccagaccactagctgtaccacgaggcttctgtgagcagatggcatgagacaggtgagtgcttgcatggaaaccggggcactgggggtccagggtgcaggcctgcttcactctgggcaccctgtaactgctcctgctcccaagtgccagtgatattctgcagatacaaatgtgtgatcacattgcctgggccccagtctccgaggagcctggtggtggtggtggtgggcattttcagcctgggtgtgctgtcaggacccgagaaggtgacaggagaaggtgggaggtgaggaggagtgtcagacgtggggtggggggtgtgaggctggagaccaggaccctcgcccggagccttgctgtgatcggctgtggtggggaagctgggcgccactgctctcagcatgaatgtgctcaggctgttgactgaagggtgttgctcactcttttttaagaagcatgatatacatctaggaagagtaatattttaaaagtctttttcccttttccacacctccgcttgaaggaactccaaagcctgcagggtaaatgagcagtgttaggatggccaagagctctcaggctgatttagtacttgtgggcagggccccttttcggattgattatgacacatggtgctaatggggttgatttctagtgggaggtacagtatgtgttacccttcgagttctgcaaatgaagtggggggaggaaggaatgcattcaaagaaaagagagtggaattcggaataattttttttgatattctcttaaaggcacaatgatcagaacctgccatgttttatttcttttcattagaattaagcttaggttctgggtatcggagcatctctggcacaggttgtattcaccctttggccctcagatgtcactgaacaggaagctgccgggtgagtttttgataacaaatctcatggcaggatggtggcgcctccctcgcctgctcacctgccctccaggctggtactcactgagtgcccagtgtgtgcccagccctagagccgaggccgcagaaggccctgtgcttgggggcttgctgcgatacggggcatcccaggaatccaggactcagatgagtcaatgcagacctgctgctgggagatagtgctggaggggaggagagtgctggcagagaagcataagccccggcgagattccactgaggggaagcccagggatttctggaggcaggtgatggagctgagggctgaacacggacgggcggtgtcgcgccgtgaaggcagaagagcctgtctgggtggagggcacagcccgaggcccaggggaggcagggagcttttcgggtccagagctgatggggtgaggagtgaggggccccaggtggactcagggttttcttttctgaggctgagtgggatcttataggccttggggagccattggagtgttttcagcagcagtgacagggtctgtttgcactgggccacggtctggagactgggcagtttgggggttggaggagtttccctggcccagctgagcagggctggcgcggacagagagaatcccgcctcttcaaggtcgctcagctgaccatgggcatagctggacctagagtgccagcgaccctccatgcttctgccaggaagtccagcggcatctttccattcatggtggttacggaattggccgagtccttactctgacctacagtgagcctcaagaaacaaaaatgtccacctgtgttcaacaaattaaacatgtaaaagaacatactgggcgtggtggcccacacctgtcatcccagagctttgggaggctgaggcaggaggatcatttgagcccaagagtttgagactagactgggaaacgtagggaaactgttgtctttacaaaagcccccaaaattagctgggcgtagtggcacttgcctgtggtcccagcaacttaggagcgtgaggcatgagaatcgcttgagcccaggaggcagaggtggcagtgagctgagatggttccactacaccccagcctgggcaacagaacgggaccctgtctcaaaaaaagttaaataaaagaaaaacccaattcttcttgtttaatagggcagcaagactaaaacagtaatcatcagatgaaatgatagtagaaaatatgaaatatgaacaaatgattgaacccgtgagggctcgagactaaggggcagagacacagccagggtgtctgggttcagcagatacttccagagccctgctgtgtgctgggcacaggggctgcagacagatgcccgccccccccagccccgggatgctccacacccagcaggtgctgttggatacacagtgggagctcctcctggcctagggtctgtgctgggagaggcagaggcagacaatggaaaggctccactctcaacaaagagtggggtttgatgtactggggtccgagaaggtagcattagagcagggagtgaccatatgggtactggggaagattctaggctgaggcaactctgtgcaaaggctgtgggtgagcggttgcctggagtggtcaaggccacatggctggagaggagcagggggtgcagagggcacatgtgcatgcatgtgcacatacaggcatgtgtgaacatatgtgtgggtatgtgtgatttcccatagggcccagggtccaggtgggatgggagcccttccaggtttggagcagagcagtgtctgggtgtaggtttccagagggtcagggtctctggggaatagatcacggtggaggcccaagggagaggcagggtgccataggggctgttgcagcgttgaggccctagggacggctccccaggccagggctgtggggtgcttggagtggaggaggaaccagaggatgcactgaggtggagagctggccgagggagatgtggtgcgtctgaatttctgctgagcactggaattccattttatcaggatgaggatggctggggaagggatggctttgatcattgcttttattgtgaggagacaatttgtcatcagcattggtgttattttggcctgacttttatcactcttgttcatcatgatcttgtttctgcctaactttcgtgcttgctaccctcttagaaaatgatgtatcacttatttaggatattatgtgttaattgttgtccagaaatcaaactaagtttctttccaagaaagacgtgatgtaaagcactttgattccctgggagaacaggtgctgtgtgtgcacaaggttttgctgcctgattattctagggaaaatgagacagtgattatatatgttggcaggactcagatcacaaactgccctggatgtagggggaggcttgggtgaatctaaaagcatcctcctgccatttgaggtgagtcctctccatgttgggagtagaaatggctcttcttttaaaatagggtccctttcttggctctgtctctgagtcaccctcctggggtcacagatcagctgcatgggcacaggttaggaatgtggtctcagcctcagccttggaccccatccccccatcaaaatctgccttttaacaagatccaaggggattcttgtgcaccttaaagtttgggaaatactgagttaggacagttttaaaacattctgaggacttcttgcttcgagatcagtattgtattagggcagctgggtttaaatcccaggaatgccagcaggtgtgtaggactggtgtgaacagtgctgagtacttgggtcaggttacagatcgaccccactagcatccagcaatctggcaccccatggatgtttccatagagagccctttgaaaacgagagccctggtaagctggtgtgtgtgctggcatggaagagagagcctctctttcctaaggaaggcgtcaaaagcaggggttaggtgaatggagggagcccaggcacgtcagtgcccagtgtggcaggtgtgtgtgccggggaaggaaacctgtgttgttggaacgaagttgccatttggcggaatttggtgcacttacttggaaaatattgcccaaagaactcagaactgtctgttttcttttccttaaacatttctcttgtcagagtgatgagaaaattgcctatgtgggaacttgagaagtgcaaatttgttaatacttcctttgacaatggtttgtattcagagctgtttatgagctgtcacaaatcatttccagttaaaacgtttctgccatggagtcatgccgcgctggagggtccggcgggacagacgtgcacagcctcgcggccctggctcagaaaggcctgaacccatgtgccgtgggtctggtttttaagctggtgaattgaatcgtggagaataaaaatgacctggtttctgtggaaacctctgctttgaaaatgttcttccttttaatgatcttcagaagcccagtgtcaaggcctgagtgtgagatttcgccattcttttgatggctgggacagagcagaattcagtgccagtcctttcgttctgtaatgatgatgtttgtgagacttggggatgacacttttggctcatccctggtaggacgtggacatgcggttgcttttccatgagcagggatgggtttccctgacccactgccctgccccatccatgctgtgctcatgggcaggcgtgtgtggggtggcagcctgggcttcagagtccggcctgcagcctggatgtgagacactgagtgatcatataggggatgattttataggtctggatgctttatagcagtggctctcacctgggggtgactttgttccccagaggccatttgacaatgtctggagacatttttggttgtcacaagtgggaggtgggaggtgctcctagcatctagtggggagagaccagggatgctgttagactgcccacagtccacgggacagcctcatcacaagggtttgtccaacccaatgtgtctgtcgtgcccaggttgagaaacctgctttaacagtagtggtagtttggatagatggataatggtaaagatgagaaaaggatacaatggggctgggtgcagtggcttaggcctgtaatgccaggctgaggcagaaggatcgcttgagccgaggaattggaggctgtgatcataccactgcacttcagcctgggcaacagagcaaaaccctatcttaaaagaaagaaagaaagaaaaaagcatacaatggccagatagtggttgaaaacatgttagatctccaatatctggttccatttctttttgtttttcatttatttacttagtattcagaaaagaaatttcactgtccaaaatccattttttcccaaccaagacagttgaaaattcctaaattctaaataatcagacaccttcagtaggtacgcttacttttcttccatgcttccgtagtattttgcttaacagagaatgttagggttttctttttgaagctcctagtttgtcttaatgagttaattctacgaaatcctttttttttttcttttgttagcattaacatggaatctgctaatgaatggccactagggacgatggtgaaaacacttgaaatgagatgcctctatttgaatattttatggtcatggaattggctatttattttatttttgcttttatgatttcaaaattcagatttctttgagcaaatgtttagagatgacaagagggaaactcagggatggaataatctattgagtgtgaaccaaagattacattctttttcagaattgtccttccttcctttttactgggtcccataaaaggttttatgatctgattgtaccttattgatatttgccaattgataaatttcttgttcattaattcagtatttaggtcaatgatgtttcttcctggcttagtatgaagtttagcctttcatgatacatatttcctctttctttagctagattaccaataatgttcaaatggggcaggggaaggattacaccagaaaaactagccttttacctctgtgaaaaggtgcctcccagaagcaccatctaaaagcaggtcatgattttaatccagaatggccaagtgctgctgctgtgtacaacttccgaccagcatgatgctggacagcaggtctctaggtgggttcattgagtatttaggtcaatgatcttgttgtgctccattcgggatgactgagtattcctgaaacaaatgctatttctggctgctgccattcccgcagagcacttgtgcaagttcataagacttcctaagtgaaaggggaatttgcatagtttgtggattccttccttccttcgtcctcctctcccctcccctctcctcctctccctccttcctgctctattgcccaggctggagtgcagtagcgtgatcatagctcactgcagcctcatactccacaagtgtatcctcccgccttagtctcctgagtcactgggactacagacacacaccaccatgcctggctaatttttttattttttggtaaagacagggtctcactgtgttgtccaggctggtctcaaactcctgggctgaaatgattctcttgcctcagcctctgaaagtgctgggattataggcgtgagctgctgaacccagccctcctaatttctgattgatttttgagtaagatgagttttagtgctaaaacatcccacgtcggtagctcttagagaagtacttagtgaaagaaaccacatgccttcaaatgctcatatatatgtatgtaaagcatacattggtatgtggttttggttcattttcttccacttgtttctttctcctgttttctgattctcccctataatccatccctccctccctccctccctccatttgtgctgctcacaaactcaaggggcatcacttacatgggataatttgcctttacagccacccacggctgctttgagaaaggaagtgttcccatcacctgttttcctttgcttggctgtacctgtaatgactgagccccactgggtgcgcagggcaagaccagccttcgtgtctcttggcccaatggaggccccaggaggggaacgtgtggtttggagaagccgcttcttgcaccactgctcctgtaactgaccttgggctgtgtggtctgtccagcctcggttccctgtctttaagatgcatgtaacaggacctctcggatttcttgggaggcattgggtggaatatagcaggtagattttgtaggatagtaggtgctaagttcaggtcagttacttccccttaaatagagaagactctaagtgacatttggataatctcctgagagcacactgtaacttctattggaggtcattgccttgacctccttatgcccaggggcagctgagtgcccacttgccaaggtgtgagcaatgcgccctgttctgctgtgagccttcttgggaccctgcatagagcctgttcccttccactcactgctggctggtgtctgtggaacagccttccctggccttttggcggccctgtcagggtctggaaatctggctttgtctcagaaatctggctgcggaagattttcctttgtgtactgtcataaatgccttaaatgtattagggtgctttgcaaatctttctctaatccgttttgacaaatagctgagtagtattggttttatgtgaacttggcaaaatttgctcccgttcagggtgactggggcatgtgacaattagtgggaggtggcaggattcttgagtgtagcatttctctgactcagccgactatttcctttttcctgttgctttattatttattgttgctattctttctgccaccctctccctccctccttacagatgtctgtctttccaggactgtccttgtatttttttatcttctctcgcatagacatctatggcaggtccatccttgaatacccactgttccttccggtgactaccatggtgtggcagctctaagggcagggagctcatctctgctgaatgcagcccattttgtggatgccatggcacctagaaaccaactggatgcagttgaatgtgcctccctatggcctccctgggctgggattcagagcagggctcacttttcttccatttgttgggactaatgtgtctgaagacactgccggtgccccacctggttccctcttttccaggtcaggcagcccagcttgctttccccatccctcctctaatgcgttcacagccccctcattcctctcctaggtgatggtgctgtgggctttcagagctcagctacgatggactgtgtcttagcacaacaggcgtgaggaactgatgagggcattgggaacggtgaggtgctggggcacattagtcctggctccagggaatagcagaactctgcccctaacattccatttactggtggaaaaatagaccagcgggttcttgctgttctacttgctagatgatagattttcttcatcttgtttacaagaaagaatgtggtttcttagccaaggacttgatttctggttcctggtgaacagttttcagagcactctgagcctcttcatttgtagaaagggaactttgagaaaatgcccagcacagtgcctgcctgggacagagcgatttcagcaaatgtttacagaaatcccagtttagttcaagttgtgagctgagaatccttgctgttggttttaggtttccagcctcaggccttcagaacctttgggggttgtatccctaacctcagccgtaccctagaggccaggtcagcagagtgagtgataagcgcactcgttccatcaaccgtgcggttagaaacgtagaggttgtcattagaaagtgcagtctttctatcctacttttgaatttcagggaggagcttcaggatttgtaaagacttcatctatattgaagactgcccaagagttatggcttacccggctgcaggcagcatgccacctgtatgcagtacctgtgctgtgtctaaggaggaagggcgacttggtggtgggggcgggggagaggcaggactgcgagtgccaccagagcttgagagagcaaagaggaacagaggagatgggggtggagctgtgcagagcagggcacatgtgcggctctgtgtgtagaaaatgagtcccgtgtggctctgtgtgtggaaactgagtcccgtggggctctgtgcgtgggggctgagtcccgtgtggctctgtgcatggaaactgagtcccgtgcggctctgtgcgtggaaactgagtcccgtgtggctctgtgtgtggaaactgagtcccgtgcagctctgtgcgtggaaactgagtcccgtgcggctctgtgcgtgggggctgagtcccgtgtggccctgtgcatggaaactgagtcccgtgtggctctgtgtgcctgggggatgagtcctgtgtggctctgtgtgtgtggaaactgagtcccgtgtggccctgtgcgtggaaactgagtcccgtgtggctctgtgtgtgtggaaactgagtcccgtgcggctctgtgcgtgggggctgagtcccgtgcggccctgtgcgtggaaactgagtcccgtgtggctctgtgcgtgggggctgagtcccgtgtggccctgtgcgtggaaactgagtcccgtgcggctctgtgcgtgggggctgagtcccgtgcggccctgtgcgtggaaactgagtcccgtgcggccctgtgcgtggaaactgagtcccgtgcggctctgtgcgtggaaactgagtcccgtgcggctccgtgcgttggggctgagtcccgtgcggccctgtgcgtggaaactgagtcccgtgcggctccgtgcgttggggctgagtcccgtgcggccctgtgcgtggaaactgagtcccgtgcggccctgtgtgtggaaactgagtcccgtgcggctccgtgcgttggggctgagtcccgtgcggccctgtgcgtgggggctgagtcccgtgcggctctgtgcgtggaaactgagtcccgtgcggctccgtgcgttggggctgagtcccgtgcggctccgtgcgttggggctgagtcccgtgcggccctgtgcgtgggggctgagtcccgtgcggccctgtgcgtgggggctgagtcccgtgcggccctgtgcgtgggggctgagtcccgtgcggctctgtttgtgggggttgagtcccgtgcggctccgtgcgtgggggctgagtcccgtgcggctctgtgtgcgtgggggccgagtcccgtgcggctctgtgtgcgtgggggccgagtcccacgctgctctgtttgcgtggaaactgagtcctgtgcggctctgtgcgtgggggctgagtcccgtgtggctctgtgtgcgtgggggctgagtcccttgtggctccgtgcgtggaaactgagtcccgtgtggctctgtgcgtgggggctgagtcccgtgcggctctgcgtggaaaccgaatcccatgcggctctgtgtgtgggggctgaggctgagtcccatgcggctctgtgtgtggaaactgagtcccctgtggctctgtgtgtggagactgcatcctgtgcgactctatgtgtggggctgagtcctgtgtgccagtcttcccattgccatctcagggatcctcagggcagcctggtgaggacagtgagggcacgggattgcagctaacacacagagctgtgcagtgaggcaggcaggagcttgcttgggagagaggcaggggagtcgaggggcacctggcaccttatctgggccagctggcctgggttcgagtcccagctctgcccattggcagccatgtgaccttggatgcttcactcaaccctcctgtgcccgaatttctccatcgataaaaggaagatgttggtaatcgtattacccacctcatgggttcttataaagatggaaagaataagaatcaatcatgttccgagcttgagacacagctggctgattttaagtgtatgttatggttaaagtgagggagtcgagcttggactgtggaccacctgactgcattgctgtccctctaaaggtcatgattgggtggtaactgaacttcagcttctcctggattcataatcttatttcatttcataaagtacaatcatacagtcaacatgactttagaatattggaggaaactttctatgttcctcaagtaccatttaattaaagaaaaaaaaaagaattttggatgaaactaatataaccctggggtgggcaagtctgttgggggcatgggaggggctatgatggagcagggcaggacacgacccggccctgtcccctctggtggattgggccccacctgtccctttccaggcccagagttgagcagttggttgagtgggtgggtgggtaccgtttgaaagagcgagtgggggctggttgcgggatggacctgagtggctaggatgggtcctttgaggaggtggccctgccaggcggctgctttacgtcaacggccagtgaagctggggctgcagacctggagggcttcccagccccgcccccgagttatcctcagagcaggccttgctgctctttccaaagggtgtctgcagaccgttagacagttgcttggccaatgttcaacagtgtgcaggaaaatgcttagaaagccaggaacgaatggtttctgaagtattcaccatcattcaattccacagtgtccctttatgagtttagctaatggggagttgacttctctgtgtagatattctgagcccgattgcttaggtgatggcattcttggcagggaagccgctagcctgtttttcggagtagatgttgtcctgtgcttccttcccatgtgggactgccatgcaggttgaagacggttttgtgcttttctctgcaaatggctgttctttggactgtgtgaggtgattctgcgtagcctctcccttcttccaggattctgaatctggattgattttgttgatgaagctttctgagatgcattgctgaaaagagtagttgaagaatgtgtctggagaaagcatatgggtgcatttcacaactgtgctgtttcataaaagcgtttcaagtacagtcttcccgaacctggaggattcgcaactggcctataaacagactccagtatttcaaggttgaggaagacgttggcaaattgatctgtaaaattatataagagctctctcttttcttttacctgagttaaagctgagttgcccaagccagaacctggtgctgttctgaccccctcctggctccctgatccatccactgtgtcgccaaggcctgtgattctaccttctaagtgttttccacatggctcctttcctcccgctgtggtcactgccttcaattctcaacatttcttgcctggacttttgcaacagcctctgaacagactgccctgcctccagcctctgccgtctctcccctcctcatatccttccctgcgccttccaaactcctggtctaggacctcgttctgagaaccgccttaccacctagtggcagggctgacctgtcactgcgtagctttgaaggtcaacgccaaacttacctgtgtggcctggacggggtctctgtctccagcccccatttcactcagttcctccggggacactcgaagccctcccccttcccactgtgctgcctggagcatggctttctctgtcctgcagcacaaatgtcagctgcccaggtgagcccttttctgggctcatcgcaatttgtcaaaacgtgtgacagggatgaatagctccatgcacccaggagcaaggcgtgccacatctcttcatttttcttgagaaataaatctcctttgatccctgactcactgagaaagatggggtggctgatatcagtcatctggggactgtcctccccaggcacgtttccgaggacttgtcactcagtcacacctggccccactccccagggcttcgttggccatgggtcctgcttgcctggtgctgagatcttcttcaaggtctgctgaagtcatctcctgttggggtggccctgggactccactctgctgcacacagctcaggcctccaggggtcttcctcagccccctcctcactactcctgaggtctttgccctcccctgggtgggtccctcttctcctcccacccctgagcactcagcctcctcctcacccccacgtggatctgctcgatctaggtttagagctctggttttaagcatcgatatgtttaagcattatctggggagcttgttaaaaatacggattcctggactccaccccaagagattctgactcagaagcttagatgatgcctggcagtgaacgtgtgttttagcaagaatggcgggctccttgacacggttgttctgtagtttggacagtgagtagcactcgcccagaccttaaaaacaaaggctttttcggggcttgtttttagggctcccccgacttcttcctgtggacccaggaacacagaagatcattttgctacagagtccgcataagccctctgccctccagccctgcattcacagctagcctgggagctcctcgagggcagggcgtggcttcattcctcctgcacaactcctggtacctcgcactgggtccgtggccagatgtgggcaggagcagtctcggggacaacagacacagcccgctgaggaaggcacccaaccctgggcttggctttcctttcctttctggcatggggctcaggtgtccagaggcgggaggattccgagggtctctggtggctgccttctccagatttgggcttggactgggcacagctgggaatcagttatgttttgttttgttttgaattggcatagtgaccgtcttaggcagaaggcaggctgccgcagggcctccacgctcaggcgctgcctggcgatggcttctccgtggaggagagggaactgctctgaagcaagcccagcaccgcagtcctggccagacccgtgggcagatccctggagtcctgtccccacactacccttggagctgccttccgagtgtaagttacagtttcagtcacagcctcagaggtggcaagtcactgactaggaagagagttgaaatgaacagaattctgagtaagagtaatactaagagttacaattttatgttccagtgaggtagaaaatcttttacgtcgactgaaggctagatctcctttcatgtggaatctctttgtgaaagaacagcattttctgagttcacgcctaggtcttggttagaatcaacagggtaatggtggcaagggagaggtttgtgaaaatattctcagactgcacttgtgaattatgaatgcgactgctaacattgctttagcagttcagtgacacctatctttgcaaaatgtactttcacttgtaagggccaaataattctaatagaaacattttttggtatgtaattatgtagatgtagagtgatacactttttttttgctgtgcacttaaaaattatcaaagtaatgtttggaacgtctggaaactctacttctgatcactggtcagtttcacgcgtgtgtgtgtctgtgttgtattgtttttagtgtgtgcacacaggcctgcagccttagcagttactggaagagtggtctatctcatttattttaaaaccagcatcacccgttccacctgtcacatgtggtggtggaatttgagaagaacggggacagtttgatcaggatagtgaagctgcccaggggcatagcctgtgaatgctaattcactttctgtaaacaacctctgcagtgtttggtgtttgcatgtatgagatcagccgtcagttttcgctcagatccagctcctgctgctgtctaactgagatgagcaagcctcacttcagacgtcgtgtgtaacccagctacttcatttgttcattctcatcttttgcttttctggaaggtttcagccagaggctggggccccgcattctggctggctgattggaaatcacgcacatgtaaggattgtccagcagctttcctggggcccctggtgacagcttgcatgccatgagaactggcacagactgtgagtcacccactgtccttcctgagctttgacttaaggtaacatgggcagaccaatgcattgtttctttttcttttaaaacaattttttagagatgaggcttcactatgttgcccaggctagacttgaactcctcacttcaagcgatcctcccacctcccctctgtagtagctgggacgacaactactacccccagtgcacctggcttgacacattctttttagtcttttgaaactcttgtactttccaagatgtgcctggagagatattttcctcttaagtttaagactatagttttctactgatttcctttgttttcctgtcccagggcagaatattttgttcctgtcgatggactgcagatggtgcccactccgcctcccctgccagtctgtcctggactctctatccgttttccttagtctcagttcctcctttaccctcctcccccctcggcttgactcttctccctgcttccctcccctgttgggattctggcctagtgggagatggtttcatctgagcatctgaaaatatggggcttcttggtctttatatgcacatctgagcatgctactgaaggcagaggaagggagatctcttagggagtcagcacatgcaaaatgctgtgccttcagactgcctctgctacctcttacaaggagcctcacaccgcaggctgccctttagctgttcccttggaatgcagccttgttaagtcactgccagcgtttcccctcttggcgtccctttctcttacctaagttgttaactccagacttcgctgctttcttaaaggctaaagtaatgggcagagtaaaaccctgaaatgtttagaagctatgcagtattatattgtaaacctgtaaaaattcttaacaaagttagtggcttggaaagattttcatgagaacttcagctaaaaggcagtaaagtaaatgccttaaaataactaaactttggcttataacaaggccattgtttggcagtgtccactttttaaagactttccagaacttggaggaggaaatgatcctgagacaaagtagtgatttaaaaaatgaagacagtaaattaacattgacattattcgccaacaattgatttcttgtcttccaactttttaccctgcattctgaataaattggaccatgtgaggaactagaagattaactttagggtttttgtttgattgaaattggttttgcagaagtggaaatttggcagcatgtatggaaaccagtaaatcagtttacagtgttctgtgcttcttagtttatgaaacccacaagaatgaggaaaggctgcatgtctttgaatgcgagagggctgaactaatgtagggtttgccttttctggaagtttatttttacccttattaatttagtagcttgtagagcagcatgtccaaactttaactagttaatagtggctcccaagctgagcaagatttcaatgccaatggttatttttcagtggtctcatagagaaaatactgggaaatattctaagaatggtgtaaaatgaagaggaacttggtaattttttaaaacactggctcaatgaaatgtaagcagctggcttacacacagtgacaatctttacaatcagatattgtgctctgaactagtgctctgatgaggtagtagaagcatgtctctattttcaattaaaatgatccgttaatgtgggaatatttggagcatctgtgtcttttcaaatgaaccggggtagatgatctttttttttttttcctgaggggaagcccatttgcgtggtggcttctgctggtagcatccgtgcctgtttcccagcctgctggggccctagcgagctgtccgacgtcatgtgctcacacttggagtcagtctgagtcggcagtgtgggagttccttccagagagatgtgttcttttcatcttgaatggttcataggtttctgcagcaggcatggtctcattctcaaactcagtgtcctcacagccttcttcgaccccttcctcctggtatccccttggatgttctgtcctccatcctcccatgtggccctgtccgtcacctgacatccatgttaacatgcttatgggtatcactcgaatagctgccttcacagcaggctcttgctgctgtggatttgaacaagtatttgtagaggagtcaaggcaggctaccttgatctgcaaacacaccagggctgtctagagccgtgtcactggaccgctgtgctggtgtctcctgggggcttgctagaaatgtggaggctgggcatggtggctcacatctgacatcttagcactttgagaggccaaggtgggatgatctcttgatcccaggagtttgagaccaggctgggcaacacagcaagatcctgattgtacaaaaattttaaaaattagctgggcctggtggcgtgcctacctgtgatcacagctgcatgggaggctgaggtgggaggatcacttgcacccaggaagcagagcctgctatgagctgtgatggcttcactgtaatctagcctgggtgactctgtctcttaaaaaaaaaaaaagaaaaggaaaaaaagaaaaggaaatgtagaaccttggggctcactacagatgtgtagagtctgaattggccgggtcgagagggcaaagtatgctcgttccaggcctatttgcattaccgcgtacaagtgtatcacagcactggaagccaaggcaaaggtactttagcagtagaatgtgttttcattaagttatttcagagtactggatccaggactttatttgcaaagtttatgcgtagatgatacagatggggtgagttctgtttggctagagcggaatgcagttagctgctttctgctttctggaccctgcatggttgtgctgcgagggatccttcctcagggcgtcggcaggttccactgggaggctagaactctgcaggagcggagaccacagccagcactaaagaagtgatctctgacagaagggaagagaaaatgtatttcaaataatgagactaagtattgtttttagaaattaaaaagttatacatgtgatatgtatgtgtgtgtgtatttaaataccacaacccagagtgtgtttgtgtacatatgtatttggatattatctgtgtatatatgcatacatgtgtacatattgcatttgaaatgtgtgaaagtacacagtgactactactatgggggatttacagaggaaagatcaaacatagtttaatggaggagaacgaccaataatatatgtttattattggctcagtttacctaaacaacaactaaacacatacaccagtgagcagtaaacattttgccattcagaaatgctgggaaatagggtgtcatgatttttaaaccattctagttaatatagaactgtcctattataccattgacacttaaataatgagactctaatgagggttagctaagactcaagtgactgtaaccaaaatgatttcttgctgctgatgtagacgactgtaggatcgtccatttctttggcatcgtgacgttaggcgttcagtgcctgtgtgaaagcgaagggtggagagggaccctctgagcctgtagaaggcccatttcccaattcccactggggggcttccagcgcactttctgggtacttagttcacgaggtctttttgagtctgccgaaggagatcttagctaccaatgaagaccaaagagtccgggtcgaaggcctcttctcagtgttcttccccttgtgatgtcctcagcatctgacacagggcctggcatgttcactatctgataagcccctgttgcgtgaagtccttgaatgccgatagcgttccctgaggttggccttgtcctgtcttcctgtagatggctctggaatttttgacgcgcaggaggtggggcctctgaactttgctgcctgagcacttgagccaagagagtgttagttgacattaggcacatagactgcttttgctttgactgacagatcttggttgaagggagagggtgggaaaagctgaaccagccctggtacagggactgctcccagcaagtcagtttccaccccaccctcctgttcagtgcttttttttttttttttttttttttaagacggagtcttgctttgccaggctggagtgcagtggcacaatctcggctcacttcaacctccgcctcccaagttcaagtgattctcctgcctcagcctcccgaggagctgggactacaggtgcatgccaccatgcctagctaatttttgtatttttagtagagatggggtttcaccgtgttagccaggatggtctcgatctcttgacctcgtgatccacccgcctcagcctcccaaagtgctgggattacaggcgtgagccaccacacctggccctcagtgctgactttgagggatgctcctgacctgtgtgtggcagctgctcggggtctgggttgccttggtccaggtagaaatcccctagagggttgtcgtgggactcaggtctttgaagagactggacacttgaactgtgccccagcaatggccggagttggtgctctgtgctccagaagaggggacttgccgggtggccatcgccattccttgttcgttcccggcaagcaaaattggaccactttactgttgcatctggtttgaagagactttcatttctatttggggagaagaacactcaaacacagcgagacagctgccagacggtgcctggctttcgcctctgtctcgctcctcctggccgcgttagtgtccctgggtatcaccccatgccgcgtgctccgtatgtgttcctcgaatctgaaaggcgctgatgaaatgcttgctgcagctttgttaggacacaggcggtcatgctttaggctgctgcggggacagaggcattatgcagcctgtaggagccatggccagtgcatggtcactctgcatggcagccttgtagacccagctgggacacttcagggacagctggagacctcctgttgctcttgactggggttaccatgaccgctagctcttcactgaggccagacccagtgagtgcagattcctggtgctggccgatgaggccctaggaaagacgcacctatggtcagtctgtcttggcttcaatttactcagaataatgtagtcctgtgagagagagagaagctagggagctgtggtgcatcagctagtaaagatgttagaaaattgtcaaaacaaaaacgatgtggcatttacaggttgaatgcatgaatgaatgcacacgtgcattttatgatgtgacactgtccctgatgcaaaaatcaggtgggttactgcatctgtggtgatggggtgggtccatctgcaatgtttctgaaaaaaacatcataaagcaaggttggttttgggaagggtgcctttcttttctatttcatatgtcaccagctgctccgtgtgttttctgtcccattatgattttcctgagatggctcttcactctgtctctgggcctccttgtgtttaatttatttgtttttgagacagggtctcactttgttgcccaggctggagtgcagtggtgtgatcatagctcactgcagcctcaaactcctgggctcaagagatcctcccgcctcagcttcctgagcagataggactataggtgcgcaccaccacatccggctaatattttcttttttatagagacaggatcttgctatattgctcaggcttgtcttgaacttaagctatcctcccaccttggcctctcaaagtgctggaattccaggtgtgagctgccggacccagccccttgtgttttaaatggctctgcttcccaggacccagccaccagctggagtgagtcctgctccccagaaaggccagaagcctgcggccaggcttctcttcaacttttgcccaaacaaatttcccatcttcctttaccttagagagtgagaacaccgtaaagatgaagaataagcgcgcctgcttcccttcagggttttccatcctccagcccctcatgcagtcctgtcctggtgcaagggaggtggtgcctgtcccttttcaggagttccacccactctgcctcttcttgctctgcttcttaggggcccatggctcacagctgtgtctgggacgtgtcattcaggaggtggtttagggttagtgagatcggcagccccacaggaccctgctgttggaaacccacgtgtggatgccccgatgcctggtgccatagggtatggcgtgtgaggagctcagccagtgccttctcttctctcctcagcgagcggctgtgcttgctggctctcctcggtggcttcctcttgaatgaacctttcttctgaaggcttgatttccttccgggaggcttagtgtttctgctcagccttctttcttggaggcctgggcttgatgttgagttgtgtttggtgaggttatggaaaaagcctgtgtttactaaaacagagggaggaggcctggatggggcatcaggtctgtctttgtgctgtaacctggagccgttgatctcttggctggacctggggaggggtcggccagtgacccctccagttccctgctggcccctacacaggggatgctaagcagcaggtcagtgtctattttcacagctagagagttaaagttatgctgaaaggaagaggtgaatttgttgcagttctctgcctcgtgtcatggaactgctgtttttagtttttcttggcttgggtgtgagaatcctgctgcctgcgaggctaagcatgagggagaaagcgtggagacgatgatcacgtttgctgagtgattgatgaagaagtgggaatatatcatacagtcctgaatgtagatttcaggggagtgtgacaggtttctgtaatgaataaagtttttcttttgtactcttttaagtaattgtattgatttaaatattttcaaatatcactgttattaaaagtagtccctttggaatgtaaaatagacacaatgttgggtagcaggaactgtgtatgtgttgaattattattttcaacagagcttaaagtcttgattaaaatagttaaaaatcatcagtttaaaaatggagtatcttaaagagctgggcatggtggtgtgcacatgtagtcctagctactggggaggctgaggcaggaggatcatttgagtccaggagtttgaggctgcagtgagctatgattgtgcctgtgagcagcctctgcactgtagtctggataccatagcaagaccctgtttcaaaaaaaaaaaaaaatccagaagaaattttgaaacaggttgccaggaaattggattggcattttgttttagaattagagcctggtcttttgacccatacaggttttgtcactttagttgggaaggaaagatttattgatactaatggaaaattaaaaatgagtcacaaattcttactttggaaattctcttagggagcttttttgtttttaaccttgaactgtagataagtagatgccagagaagtggcaaggatatttgacaaaagtaataactactgagtgacattttaagcactgactcaggttcactggtaaaatgaaatcagtgctggagaagttgtgtgttcattcttttggggtagaacatgaagccaaatatcttcaacctattttgaaattcagagctatgggctctactctgaaggcttgaataagttcggttgctgtggcctttttgtgactagacattggcaaatcatagttctattactttggctcacttaaaaaaatgttaatagcacaacaagctgactgtagtcaataataacttaattatatattttaaaattgaagagtgtaattgattgtttgtaactcaaaggataaatgcttaacaggatggataccccattctgcatgatttacttatttcatattatatgcctgtatcaaaacatctcatgtaccctgtaaatacatatacctactatgtgcacacaaaaattaagaataaaaaaaatgttaaaggcctcccatgtgccacatactctgcaaagtgttagggatgccaggatgacggggatgtggtttttgcccacaaggagctaaaagttgagtaggagaatgaatttccacttttggtagatgaggcagggcagaggcctgctctaatgtacagatgtgtatgcgtttagtatatgcatatatgctttatattatgtaacccatatttaattactaagttattttatttatttatttattttgagatagggtcttattctgtcgcccatgctggagtgcagtgggtcgatcttggctcactgcaacctcagcctcttgggttcaagtggttctcatgcctcagcctcccgagtagctggaactacaggtgtgcaccaccacgctcagctaatttttgtatttcttggtaaagatggggtttcactgtgttggccaggctggtcttgaattcctggcatcctgatccacccgcctcggcctcacaaagtacaggaattacagacatgagccaccgtacctggcctaattactaagttacatttatcagttttctgttgctgtgtaacaaattattataaacttaggagctgaaaacagtactcatttgttatctcacagtttccaaggctccacagtcaggcatggcttagttggttctctggtcaggctgtagtcaaggtgttggccaggctgtgttcccatctgcaggtttgagtatggaagaatccacctccaggctcattcatgttgctggcagaattcattgacttgtaactgcaggactgatgtccctgttcccttgctgcttgtcagctaggggctgctctcaggtcctggggagcccttgtagtgctttgccaagtggcccctcacaggccccatcatgaggtggcagctcgcttctccaagccagcaagggagtctgtcactccctcgttgcggactcctatgtaggtcgcctggtgtggggagaagcattctttgtggtattcggttgggtagaagccaatcacagcttccacctacactcaaggggagggagttgtacagggtgtaagcaatttggggagtcaccttagaattctgcccaccacagtacctttctggttatttcatggacttccgttcccaagaaatctgagcgtttgcgtcctaggaagactggtgagagcagccccagtggaggaataaaaactaagatctggaaaatcagcagtgggttgttttcatctctcagcaggcaggaaacaggaggagaaaggaatgtctgtaggctcccaacactgatgggaaggaggtgtttggctggggtagagctccgcaggaatctcccaggctcctctagctaggtgcagccgtgttttatccggctgtctttacatgggctgatcactcaggagtggcatatggcaggagcacgctttggggtacgagcctcctggagaatgaactgcagcacacaagccagacagatggtggcttagtcccccttggacaagagtgtgtcctgcacactggagggcggggtgctgagaggcgcttgtggtgtctgaggccgagctttgctgagttcacctgaaactgctttggagctcgaggcggtcacccgaggatacccggcgctccacctgggacggtgcgatgcccacagagcatgctcactcagttgggatggggatgccagtgacaggttgtatggaatggacaaaatctgaagcaccagctgggaggacactctcctaacaggatggtgggcaggtaaaggcagccttgcaggcagagtcacgaacgttaccatcccagcagtgtcactgctagagggcttgcctcttccatgaaatcagacatgtatttcagcagaggaatcactggggcctgcccgtcttaggtgggcccatgttgtcttgagactggattgtcgtgaaagaagatggtcttttcacagcttttagagtgtgtatgaattttaagaagaccagtccaacagggatactatctgttatttggcctctcatcaaagaggaggcccgtgcctctgcaggaacaagcgtgtgtcctttaacagatgaggactcggtgcccctgtgactgagtggaggcagagggggattttgtcccagtttggtaattctgtgctgtaattcttctctcttccttccctttattacttgatgcctattattgcatttttattgtattcattttgatatttatgcctcttctcgtgacagccctcaaatatttaactgtttttgaaacttgagagggggacacacaaaaagaaacatggctcacagaagttcttcatctttctttctagcggttcaagctctacgttcgtgacatcaaacctcctgttgggccatttccgagaactcccatcagtttctgtatagtgtaaaaggtaagtggaattacttgtgactgttctttgtgatgatgtctgggaagcagagcttgtcgcggcaggagctgctctgcagtggtggacctgtctggctgcgtttgttttgacaagggtgtgcctcatttgtgtgtttcttctttggggctggatgttaatggctggggcttgggtatctattcacagtagaagcttgggtgacacctgtgtgttttcagagccagccctggtgggggacagtcagtggcagagctgggagatgcccagagccccctacctggcatgccagcttcagcctctggcctcaggatgccctgctccgctcgagacgccatgttttctcagttcatctgtgattttagtgatgcttattctgtctcattgtcaggcttcacttgatgtcaaagaacatgaagtgaagaaatacatgagaattttcaggaaggtaagacattctataaaatataaggtccatttttttccctatatttttaatgtgcctggtggtgggactcattgcttatgggaaatccctttctagaatgtaagccttatgagggcaaggacctccctctctcccgcttgtcttccttccttccatttattttttcttcagggtctagaacagtgcctgcagtgtcaggagctcgataaaacttttggcaaatgaaacaacttgatgaggaatcccccctgaagctcttggagcataacccagccttttcctttctggttgctgttggcagcagaggaggcacctggagaatccaggaggatttgtggtgcttccttgctgaggcacacagaccctggaatgtaaatggactttttacagttgggtgcaaagcagtatgcatggcagagcaaaccacgcctgggttctgtgtgggggcagctcctccactgctgagctcgtgtgtttctctcctctctcctgagtgaatttcatgcccaatcgattggctctcgggaagctggggtggaaagagctcacggggaacacccagaccgcacgccttgtggatgttcagtgactgactaaatgcttgttattcacacgatccctttattaacctgacagaacagcacggtgtttgaaaatccctgctcttcgctggcttggtgggtgtggaggagctgtttttcttccatcgtttggcacacccaccgccagtttgaagtgggcggcggcagcgcctctctaccagggctgacaaaagcgtgggtgcagtttcatttctcttttattgtctcaaatacagttgccattgaattgacccaccaaaaactagcactgtcttcaagtagaattttactaggtagcggaacacaccactggactatgcccccgaagactgaaacttgagttacaacatttcagcaaaagtaaaaataattcttgcaaatgacataagtatctgattttcccccttatgtggggttacctcactcatcaattagtttaagcaactttcaaaattggtaatggaaaactttgtcttgactgtactggtatatgtggattttaaattaaatacagagctacgttgcttctcctgataatcagagcagctaaagaagaaatcactatctctgcagaactgcgtggcgcttcatcgtcatgggcaattttcaagcacagacttagattgcgaggcgtcgtaagaactttcacacctctaaaataggttcttacagctgactgtcctggaatttatatttgctctgttacttgcaaaattttgtcccttaagcagctcacagctggactgtgagacattcctaagagctgataaaatggacaggtggtattgccttcttctgctttctgtctgcttgcctgggagggcccaaggaggcctagagctttgcgttaactgcaggatgtgcctgtctccttgtacagtggatttatttggacttggttttaaaatgcagcctggtccccgtgtttaggttgttattaaatgcacttttgagtttttccctcctcgatgaatctgaaaacatatgcccttgccatatggcgtttgtgtggggaactcagaagccacagaccttgggttgagttctggcgtggtaactttcattcactttgttaccttggcaagtcctaaccctctatgagtctcagcttttctcatctttaaatgggataatatttatctcatggaattactttgaagatgcctaattcagcattccatgcacagtcgtcactcaacaacatgttggctgttattttccaccctaatgctggctttctgctgtgatctgtgtgctggggggattggaggaaaatagcagaggtcctgctctctctgtcctctttcaggactacggaagtttgctaaggaatttcacacggcatcctgctggagcgtgtgggggagtgctgctgacgtgattaagcacaaaggcactggggtgtgggcaaagaaatcgttaattcaggctccctgcaccattccctgacctccgcataagacaatgcaacctcagactgagatctggctggctgtcagcacagactggaaaggtgcagctggagaaaactccacctctcttttggttttcttcttggtccttaagggatctgaaggcaccggtgcagaccagggaccatgcggatgtcttccagtgtgagaccagtggtccctgtggggagacacactggaacaatgaaaaaataaccttagacccaggcaatgcatcccgacctgaacttctatctttgctcaatttaaactttttaaggtaaaatcaaagaggaccaatagtactgggagaagcaatcattacctttgaatataggtccctgctgtctacactggtaaatagagtcctgcttattttcaccagatgtgtgtataaagtgatcttcggcaccgtgcaataaaacagattaactcgtgaaaatgttatcaaacaaaaagaattggaatcccagcactttgagaggctaaggcaggagtatcgcttgagcacagaaatttgaaaccagcctgggcaacataatgagacctcagctctactaaaaaatcaaaaaaattatctgggcctggtagctcatgcctgtggtcccagctactcaggaggctgaggcgggaggatcacttgagcctgggagtttgaggctgcagtgagctatgatcatgccactgcactctagcctgggcagtacagcgagatcctgtctccaatctcgccctccacccccctcaaaacaaaaacaaaaacaaaaaatacccacaaaagacaattggagttgtcatgtgaatgaccatctaatgctgggggcttctaacttgaggaggactgaaactcagccttgaaggtggttcctgcagggggtgccccgaggtttcccacctgcatgggcagtggggaagctgtgggtcagagcttctgctggcctttcaggttgctatcagggaagtgacaccaaggtggccagtgctgggatcctgggagggatcccaggtttgggggttctattcaggggtctcccttggcttctgaaagagtttctgagttcttcagccttatttgggacccctctctgtgtctcccatgtctcctcttacctcctgtctcctcccggacctctgtctacccagcatcaggggactggattctgaagctccatctcaccattgtccccgattcttcaacttcagggttgtattagtccggattcatgctgctgataaagatatatccgagactgggaagaaaaggaggtttaattggacctaacagttttgcatggctggggaggcctcagaatcatgacgggaggcgaaaggcacttcttacatggcggcagcaagagagaatgaggaagaagcaaaagcggaaacccttgataaacccatcatatctcatgagacttattcactatcatgagaatagtatgggaaagactggcccccatgattcaactaccttcccctgggtccctcccataacacgtgggaattctgggagatacaagtcaagttgacttgtgggaacacagccaaactctatcatcctgcccctgacccctccaaatctcacatccccacatttcaaaaccaatcttgccttcccaatagtcccccaaagtcttaactcatttcagcattaacccagaagtccacagtccaaagtctcattttaggtaaggcaagtcccttctgcctgtgagcctgtaaaatcaaaagcaagctagttacttcctagttacaataagggtacaggtattgggtaaatacagctgttacaaatgggagaaattggccaaaacaaaggggctacagggcctatgcaagtccaaaatccagcgaggcagtcagattttaaagcttcaaaatgatctcctttgatcccaggtctcacatccgcgtcacactgatgtaagaggtggcttcctgtggccttgggcagctccactcctgtggctttgcagggtacagccttcctcctggctgcttgcacatgctggcattgagtgtctgtgtcttttccaggcacacggtacaggctgtctgtggatctaccattctgtggtctggaggatggtggccctcttctcccagctccactaggccatgccccagtagggactctgtgtgggggctccctagcagaggttctccatgagggccccgcccctgcagcaaacttttgcctgggcatctaggcatttccatacatcttctgaaatctaggcggaggttcccaaacctcaattcttgacttctgtgtacccgcaggctcaacaccatgtggaagctgccaaggcttggggcttccaccctctgaagtcacagcctgaactgtatgttggcccctttcagccacttctggtgtggctgggacacagggcaccaagtccctaggttgcatacagcacggggaccctgggcccagcccacaaaaccactttttctttctgtgcctctgggcctgtgatgggaggggctgctgtgaaggtctctgacaaggcctggagacattttccccatggtcttggagattaacattaggcttcttgctatttatgcacatttctgcagccagcttgaatttctcctcagaaaatgggtttttcttttctattgcatagtcagcctgcaaattttccaaacttttatgctctgcttcccttatacaactgaatgcctttaacagcacccaagtcacctttggatgctttgctgcttagaaatttcttccaccagataccctaaatcatctctttcaagttcaaagttccacaaatctttagggcaggggcaaaatgttgccagtctctttgctaaaacatagcaagagtcagttttgctccagttcccaacaagttcctcatctctgtctgagaccacctcagcctggattttattgtccttattgctatcagcattttgggcaaagccatttaacaagtctctaggaagtttcaaactttcccacattttcctgtcttcttctgagcccttcaaactgatctgatttctgcctgttacccagttccaaaatcactttcacattttcgagtatcttttcagcagtgctccactctactgataccaatttactgtgttagaccatattcaccctgctgataaagacatacccgagactgggaagaaaataggtttaattggacttacagttccacatggctggggaggcctcagaatcgtggctgagggcaaaaggcacttcttacagggcggcagcaagggagaatgaggaagaagcaaaagcagaaacaaacctatcagatctcgtgagactaattcactatcacgagaatggcacaggaaaggccctcataattcaattaccttccgctgggtccctcccacgatatgtgggaattctgggagatacaattcaagttgagatttgggtggcaacacagccaaaccaaatcaagggttaagagtggcattgagaaaatcagaaatgcagcaagggcatcagggatgccgaatgcccttgttcatagtttggattagagaatgccagcccgcaggaagaaagtcccgtggtgggaacaccactttcagaggtgggaaagagaaacttaccacctctgccacttctgcccatggcctgagacctgggcctcgtctccgcctgcttgttggattctgtcttctgtgattagagtttattagtttctcatcaagcagacctgtggagtcatatgggataaatactttgacgctttgctttaaactcaaatgcgctagcagctccgtcagttcatgcctagcacagcattgtcaaactgctaaaaagccagcaaattttccacctaaaattttgtgggggaggccagggtgggggatgtggggaaaagatgtaaaaataaaccctcagattctgggttgcttggtggtgtgtgtatttttccgtggtgcgggaggttagaaatagcattgctttttatgggattctcagcagcagcttgaaaatttggctttgaggatttggtctccctgtgtgggtgaggtgagtcctctggtgcggtttggggggcagtgcaccccagcacctccctgtccgttttccgccttcctgcccctgctcgaggccacccggatgagctgtgctcgagtgtgaaacacgctttgccaaggtcaggttcctgagatgactcgcccgtggcagctggtgccagtgttaacagactgcatcgcagcagtccccataagtcacatcagtgcatctgtgagggcagtcgcagggaggggcgtcctttggggatgtggcatgtcggacgggctgtgcctctcaagccgatgtgagacgacctccccttgacgtcctgacattggttgggggcgtgggctgccctttcaaagagagtcctgagggattcttgaaatttgttatatagttcttacaaatggagggaggttgcagcgtccctctcaagtgcagtacagaagcgaaatgtgaaggagacaggcactgggacagtgtttgtaagccccaggggcccaggggcatctgtgaattccttgaaatgttgccagttcctggggagaatgccagggctttgataggattctcaggagggttttgacctccagaaagggttaagagcacttgcagtggagcacaaggtgtgtggttcatttggcttggggcagtcacttcagtgatggtcagattggaggtgtcatgagtgggcagagggtgacatggacaggcttgccgaggacagtcaggggacaggattctgttgtcaattgtgtaacttaacatgggggccattggaggtgtctgctgggcttttcctttgtaggctttcttcttgaaattcatataatattttaaagttggcgtgcttcctgcaggaggcttcgtggcgatgctgggttagcttagtgagctcagtgcttgggagagggttccgctgtgcacaaggggtctggggtctgtctgcttagcctgacgctttaacagtttccctctttttgtcctgggatctggtttgctggggctgtccacatttttccatgtctttcttgaaactcgggggttgtggtagggaagtcaaggctgcacccttgttagagaatggtgggggaaactcaagccagtccttcaactcagctttcacagcacactgttaactttgtttctcaaactttttgtccctttaaaaaaaactgtggtaagatatacataatgtggagaagttggaacccttctgtgttgctggaaaaaatgtaaaatggttcagttgctatggaaacagtatattttaaccatttttaagcgtacggttctgtggcattaagtacattcacgttgtgcaaccatcaccaccatccatttccagaactctctccattttcccaaaccaaaactgtgtacccattaaacattaactctgcattccctctccctccagccgctgacacccatggttctactttctgtctctatgattttgactgctctacatacctcataagtggaatcatgcagtatttgtccttttgtgtctagtgtatttcacttagcataaagtcttcagggttcacacacattggagcctatctcagaatctccttccattttaaagctgactcatattatgttgtccttggaacaggaagacgagagctagagatacagttggaaaagaaagttagggtcaaactatagagttttgttatttatttatttttagagacagggtcttgctttgccacccaggctggagtgcagtggcacaatcatagctcactgcagcctcaacttactggttcaagcaatcttcctgcctcagcctcctgagtagttgggaatacaggtgtgtgtcaccatgcccagctaacttttaaaatgttttgtagagatgaggtctcactatgttgcccgggctggcctcgacctcctggcgccatgaggttttgaatgctctgcatagattatcccatacgatgtgggaaccactgcacttttcagaggagacagtgtcattagatgcgtgtttaggaagctgagtctggtggctgagggtgggagtcagtggagaaggagacggaagctgagagggccagccaggaaggacagtgaggagctgtccctggcctgggggacagggcctgagctgaagcaacagctgtggagaagaggcctggggtggagggatccgtgcgccgattgtgttggtagctggaatgtgcagggcaggtggggcagaaggtggattgcagagtgacttttgggcttcagtcttgggtaaagagaaggtggtctgagcggagacagcagcctaggaggtggcgctcactccgagtggagagcctggaccagcccgtgtggctggatgcgtctggagggcaaatgtggggaaatgactggagattggctagaaagcagtcaggctgggagaagtcaccacacacagagacttggtgtcacccgcaacagcacaatccccaccaggacgtagaggaaataagaaagcagccctctggagagcaggagaagtctgcaaatatcttagtatatctttctatgaaatactgtcccataaagtacagaaagatacactcagatgtcttgatcttggtgctgtaatgacatttattatagtataatcaggatgatctgttctgttatcaagtttttgtttgtttttcatgatttttcaaaaaacagttgttaacactttttaacgtttagcccaggtaggaggatcactgaaggccatgagtttaaacagtaaggttgaaatgagtttgccttctgtatctcttgagttgtatctgataaagagaaactacccggtgcttccctctggagagtgggtgcagggtggggacatcctctggataagtaattggctggtgactacgacggcgccaccctatggtgtgggcttctgtaaccttctccactgtctgccctcaggttatggggtggggcgggaggtgcccaaattcttattcctacactcttctgatttcacattgaacttagtgtggatggatggagagagaaacacttattatgaggattggatttagtcccaattgaaacctggtaatcaaatatttatttcagagaaaatgcaagtaattaatataagcttcctacaatttagaataattagtggaagaatgactagaaaatactgacattggttcaatacagagaaaaacgttaaaaaccttatctcacaagaggcaaagacattaaggcaaaatgtacctgcataactagttttaatttagtaatttgggtgtttaggtatttttagaaaatctcatataaacgtagaagccgtcagataaatgaccagatgctactattatcctctccaaagtgatcactctattccgtgaagaaggtggaatgggaacaattactaatttgtattcctttcacattttgaactgaggatttacttctgtagtaatcctaattgtaatatttgggtggtggttttaatcagtaaaatgtctggcagttttataatcctctagataaatgtgagttgaatgtaatgcagaatgaaataggcaaatgtcccaacctcaacttcaggtgaataaaggaaaatgatatccttttagccaccttccattagcttagccaaaattacactgataaaggtctcttccctatctgtttaaaggacacgtgtattgaaactgaaagattagtttagctatccatattagagttgtttatattaaaattgtgtccaatttatagtaaagaaaaatttagttgctaataggaccagatacacaactttggctatttcaagttaaaatattgctgaaaaattctatttcaacaatctaaaaataatctgtaaaggtgttagcgcaatatagtgactatgaaagaaaagccatgcagaagtcactctgcaaggtgagtcatggggccacagtagcagccccgcagaccgtggtcactctgcaaggtgagtcacggggccacggtagcagccccacagaccgtggtcactctgcaaggtgagtcacggggccacggtagcagccccacagaccgtggtcactctgcaaggtgagtcacgggccacggtagcagccctgcagaccgtggtcactctgcaaggtgagtcacggggccacggtagcagccccacagaccatggcaattgaccgcaccttctgcactgtgatgacacccgcaaagcatgaggacctcctgatatgactgtcctacttagaagcacttaaaacaccacctaggaaagaaatgaacaagcacagagctttggcaggagaacttaggcactgtggaaacagcctcatccaagccccaagccttcaggcattttgacatctggggacttttagaaacaccagtcaggcctcataaggagctgggactctgttcctctttgcaacaattcagaaggctccactgcttggtattttccacatggctgtaaaggtcccagcactggagctgtttagcagttgttttgaatatgctcttgtgtcagtcttctgagttctaaaagtaaaattgttcagttccagcacgcataatggtttagttcctagggacttaaatcacatcatattcactttctcatttgtctcattgcataggtgtataaactgaggaaatgagagattatttgaggcctagactatttgtggtgactaacagtgttaaagggagtaaaagcattttgtagattgcagaacattgaactgttcaaggattcataagtgtgtaaatataagtagaatttagtactatatggccagttacttgactaatcacttaacacgaaatcttcaggagtgtcatctgtctttaatttacagttgaacaaaaacaccgactccatcttttgggagcttcagtgaagaaagcataaataagactgtgatgaagtttgctagctggccactgtcatactttgcaaagtaaaagagagatgagtcattgctaaaattatggggccgtctgtctctatgctcagccacagacccagctgtgtccagtcctgagccattgggactgccgtggagagatgggaggtggagagaacagctgggttgcagaatgccagatgtaaattccttcttgctgaagttgggtgctcgagcttctagaggtgaagacttgtcttcaagaataggcttcctcctacatgaagaataatcccatcatatctcagccttccttgtgatattgggggctcctggaagaggttcagcagcctctaggagaaccatgggaacattctggatgttccggtcaggacagcagattcctgcccttcccataccctgttggggagttttactgtgtgggcagacgtggtgggctcagtaactgtgtggggctgtaccctgtggggagacctcagtcctcccatctgagcacagctggaggagccggcagggcctgggtagttggtgcctcccctttgctgatggggcacccattcttccccctggttattgtcaaactagatgattctgtttccccataattctcagggtcctcagtgccttgatccttgaagaggaagaggggctggggattccttcctgtccctggttttccatagaaaagtatcagttaaccttttacatacctaaaatgtttggcttgcagatagtttcagagtttgtagcagcctcctgtccattaatcgttgtttatatcttaagcattctccaactatctcaatatatcttaacttattctgggtaaaatgatcctgaaccatagaaccctaaattatgcactttttgcttggctggaagaattgatagctattgaaagtttccactaatttgctttcttcatttgcttgtttttctttctttattcttcagacaggtattctttaaaaaaaaaaaagatctgcgtttgttttaggcattttttggcacctgcttcttgcacatgtaaaaaattagggtatcttaaaagagttttgttgtttaccttcagatgtgtgagctactcctgatttgtggatttagtgagatataaaactaaagtagaagtcaggtgctggtgcattctcagaagttagattataccagaagaacagaaacaccttttatccattaatttaaatcacagttcatttataccagactttgcctctaagatcattggcctataagaatatctgagggtgcagtctacataaggaccacactttcaaccccagtgaacagacccgcaggccctgctctgcaccgtggcttcctgagagaaaggcagctctgcccaggggcccagtcagcccttcttttgtgacacatggggattttaatttcctggggctaactaaactctgaagtattttctcagtttatgatcaatagcaaaactaaataaacctaaaacaggctgtttaccaagtctggatggagtttgggcctctgagtcacagcacagtatctgctcaggagcgtgtctgaagagtggcacacacatccacgccgcctctccttccccagccggtctgtttgctgacgtctttacacctctccaactgaggctcaatctgttgtgctccagaaaacaaaatgacaaatgacataatcagccacaaagccctctgccaccaacagaggtgttggaaggcaaaagcaattgttagtttggaagctcattcactcattcacttatttattcaatacatagttattgagtatttgctgaaggaaactataaaatgttggcgctggcaaaagccttggacaaatcaaattgtacagttgcagagggtgaggcgcagatggctgtgatgatcgggctgtggttgcagaacgtgtagcttgagctgcggggacctggccgggtccctgggtgtctggagcacctctcacctcctcacaggcacagctcttccttcgcccacagtaggctctgcaggctggcccgtctgaatcccagctgagttaccccaaagccacaactagatctgaagactctcaggaacaatgagggtctcatcagtataagtgtgatcgatctttaaaaactcctgaattttaacgaagcaatgtttctgaggaattagaatgtgccatttcatgaccaatgtaattttctcttgcattcttgagcgtacaatttttcttgaagattgtgcttttttatgcttaagattgactgggtataccaagcagaggtcccagcatggggcgtttttcatttaccaggaaaatatggccctgaaatctgttgggctgactgcttggttactttttgagccaatttgatgaaattttggaagatatcccagtgaaacgaaattttcccttctaggctaccaaacagaagttgggtgtttttagtgtagtctgtccacatgcatttgctgtgtgcccttcagaggtgcagctggggtcagtgaagcactgtgggattcagaagttccctggcctctaggagcttgccggctgtctggctgtggggtggatggagataatggtagagcatgtctgcaggccagattactctcctcattcactggcttgggtgcttcagtggcacgtggcaaacagcagcactgggtgcaccttgctgtgctcatagactgtctgtgggtgggctgctggcacaatgcctgggcgtgccctgggcatatttgtggccctgtgatctgcgctctgttcctgtcactttctcccactaattcagatggttatgtggcttgagatgatggcaggtcaggaacattagagttataaaatatttttggcatttagaaacattctagacattctcccatccgtaggctgtgggttagcccttacaatatcccatgaaatgaaacatctccagtacgttttgagaaaggagagaggatgccattggggtgggctttctcaggcccagttctgtcatggaaatgttgaaaacctttacaaatcatgcctctaggtgcagaaattgaagcataagggagccctaggagggactgaataccatgaggcgtggaaagatctttcttggtttctgctttcttcacttagcagcacagtgttttctggttattgcatggaggatttattttgcaattaatgaggcagcagtaggtggccttctactttgtgggagatcaacactcctgatacaagtttttcattggcgatcccgttactgaattgcctcaataattccagggcacaaaggccactggagagagatctaggagttttccaaccccggggatgcccggaaatgagacgatgacggaggccatgcggattccacgagttcagcgaggtcttggagagaatgccctggaggcaggcgagctttggttctggggctcgagcaccacgtcccaggaatgctgtgaaccttcactgctgacatcttaacttaaaaggtggatgcatgctgaaaacacaaacttgaaatcactggttgagctcttggctacattacagtttttgacagtctttgaagcactgaaatgtgtaatttggttttatgtctttcctatggcctgtggtcaatttttggaaaactcacccttttctagacatattcatttagtcctgggtggggtaaaaggagaggagacaatattccaggttgctgctgtgacgttttgccacatagacgacctgtagccaatctcctgtgtgagtgtgtgtgtttgtgtgctttctctaaatcagcagtatttgactgtgattattttatggcttctgtttcccctctaccacctctgaacagataccgaaattattgaattaaggatagatgcatggagcaaacacctcctcatgtagaagttatgcaaacctatgcaaaccccatacaaatgagctggccaggccagtgtctagttgggcaaaaatatcggaaatattgtgcacaccagcctgtcattgctgtcacagaaggagagcaacaaggagaagggttatctctggtgcatttctggattaaatcataactttagaatacttttctcttttacaaagtctgactgtctctctaagtaagacatcttggataaatgtccctttccctctccgtgtttccgcattgcatgttaattttcaggtggcagttttatctcattagtcattgtcacttccactgatcacccctttgaagctacatgtaaactttacttttaaactttctaaaaatgcggctttccccccttgctttaggttccagaaaacgctttgttcctggcactgtccaaccttagggatcacataggagtcaggctcacaggcttctggggccagaggagcactttaataccaggtcagcagtcactcagttgtttctgaagttggaatggcagatttgtctcagtggttctccttttaaacccttttatgccggaggttgcaattttttgaattgcagacgtgtgaaaaatcagaccttggcaatgaccttgagcagtaggatataaataactcccacatgcttagcgttccaataatggaacactgcgcataaatgggttaattaacctccggtgatttaagtttaactctgtaaagtaagctgagaagtgtgcatgggaagtgcagtttctgtccgcgatgaaagggctgaaggtggtccaggtggctgctcttggcagcacctgagggctgggggcacgtcagacagacggcccagccggtgtgcggaagcgttgaccaagataacggccccttctccacaaggcttaatcactcgacctgaatgcatggcaaggcatttttgtcatcaaaaggatgaggtctgtggtggcttaaaatgtagctgttattatagaagagtgagttacgtcttttctttagaacagaaagagaccaaagctatctcatagaactaaaacccctcaatgacaagtgaggaagtagatgtgagaggtcacgcgacctcctgaggtcccagccttcctaggcggtggagctgtagagagggctcttcactgctgcctggcccatctggggtggcctgcgctcggggacacaggcggatgaggaggatgttgtggagcccactgaaaatgagagtcttaatggtcactaggaaaattccggttgcagactttttacatcacacttgatattaggacagcctacctacttgtttgagtgtcacagcctgatatgtaaaatagtaaaaaaaaaaaaaaaaagttgtctttttagcttgttttttatgtggagtagctgagagactgtattcttgctggacaggaacatgaattctgtctttagaaaatgcttaggaaaagggagtgtactggggaccggctggtctgattttaggcatatgcacaaggactttgtagtatcaagcgcaataaaggtcatgcgttggattcataggtaaacccttcttgccctgaaagaagcaaattgtggaatctctgtttcaggctgaggaattggaccaacagcattcctaagggggaagttgcttcagcaaatatggcagcagtagggagaccccattttggcatctggacattgtagaaactcaagatactttctgtcttgcttggaatttcccctcacacagggcttaccctccacacaccaacatgcatattcttgcatgacatgctcacatcctggaaagctgagctggaccttgtggctgggatggcctcaaagttgattatgttgtagggtttcttctgtagaagcatccgctgatcagctgcatgtgtggggtcatactgtgcccgagcccagggaataccagtggctcctgtgtgtggaagcctggcgtgggtgcagggcttcttcaccatctccctgcaaagtcagctgcatcgtgcatgtcacctggacttactaataacatcaaacatatcttccctatccagtggcttgtacacaaagttaaatctgtagaagaagcagaatgtgttttaaagaatcaactggcaccttgaaatgttaagcattgtatactgactgagctatgatggtggtagtctggtgactcccaagggggaaaagtaactttgtgtggtttttcagggaatacatattcttgaatacctgcaagaaatagcatagctgctgtggcttaaatatacatgctcctatgaggctataagccttctctagtagaaataaaccatcatgtatatattttgatatgtgtgcttttaatgtttgtacaaaaagaattgtatttggggttttgtgtgtgagactgaggactgtgtgctgaggaaggcagaatttgtaaagttggagctttgggactcccaagtaccctggaagatcactggctcccctctcatactgtgcaaagagaagacctgaggctgcgaggcggggtgccttgcccaggaccccaccggcagcccagggtggaggcaggagcagaaccagcgctcttgcctcttccgtcaagggctcctgcgcctggcgggcatctctcgtgcatccctccagcgcggtttcacgagtgctgtgcccagaagccaggaggcatgacctgtcatgttagagcaggaacagagtgccgtagatgacttctgcttcgcaagaggcgaccgccaaatcagaccgggctgtgattcttctgtataagcttgtgagatgttttagggtcctctgtcaggataggctgaggtatatgaatctgctagggctgtcctaacaaagtaccacagaccgggtgacttaaatgacagaaatgtattttctgtcaggtctggaggctctaaatccaagatcaaggtgctgtcagggttggcttctggtcaggcctgtcttccgggctcagagactgccaccatgtccctgggtcctcatgtggcctcttctctgggcacacatgaggggtcttttccttttccagtaaggacaccagccccgtcagattagggacccaccctaggacttctcttaaccttttttttttttttttaaagaactcttaggctcaagcaatcctcctgcctcagcctttcaaagtgctgggattacaggcgtgagccacagaacctggccataaacagccttttattatttaatttaaagcattttaaaataataaaaacaagaaaatttagcaacaaagaaaagagcagaagccatccattctgccactattttcacacaaccacattttcctttgtgtgcatttcttttcagcctttaaaaattgttttaagacctgctttccacaaggtcatgaccacacagctgtgtgaggaggccgtgagctttgagggcaggctgaccagggtgggtttctggagccaccatggactcgttatgtgccctgggcagtcagttcacctgtctgcacccaggttctttgtctgtgtagcgaggggattccttccccgccagcgggttctcgtgggtttgcgggagatggtgttcatgagagcgcctggcctttcatggtgcacagttcacgacttcctcttctcacctgggtacttgttttttattttgcttcgtgttctgaaaggaaatcactgccctctttgataagagaaggcctctgtccccgaggatgttcgctgagcagggatcagagctaagccactctgggtactaaggggcctctgcattttggaagggactttgccactgaggcccgaggtggggatcatagcaccgtttggtgttttctggccagtagagtcacatggccctttctctgttgctctgtggtgcacctgtgggtgctgggaccacttaaccctcattacctaccagagctgctggccagcacaggcactttctggaaggggagcgcctgttccagtcatcaaaacactgtctcctgaatccaaagtcatgatgttggtgcccaaatttaaagtttaatgttgggcccagtgcagtggctcatgcctgtaatcccagcactttggggggctgaggtgggaggatggcttgaagccaggtgtccaagaccagcttgggtaacataatgagaccctgtctctacaaaaaagtttttaaagaaattagctgggcatggtggcatgcacctgtactcccagctacttgggaggccgagacaggaggatcacttcagcccaggaggttgaggctgcagtgaactataatcccaccactgcactccagctagggtgacagagtgagaccgtctctaaaacaaaaaataataagtccagtgttgaagtccctaccaggcccatcggtggtatctaagatgctggacaggccttgctttgatggttcaggtgctaaggcatgtggctggggccaggatttggactgaagctgaaagtggaggctgggccctctcttagttataggcgctaaccaggaagatgcatggggcatgcagcaggcagagcctgggtaagacatggacatggcctgacatggggacaccctagggggacaggcctgccacagtgatgggtaagccagatgattactgagaggcagcctccctgctgctgttgaggggcagggctctggttccagggtgcaatggtgcacaagctgggggtggggatcagtgtttagagaccttggagattcctggcatctatcactaggaagccagcattatggtcctggtaggaatcctggggctggaggcctgcctggagcttaaatggaaatgcacaatgttggagctgctctgggcacggtgatgttgctgctccgggcacggtgatggacctgctctaggcacagtggtggagctgctctgggcacagtgatggagctgctgtgggcatggtgatggagctgctccaggtatggtgatggagctgctccgggcacggcaattttgctgctctgggcacggtgatggagctgctccgggcacggtgatggagctgctctgggcacggtgatgggagctgctctgggcatggtgatggagctgctctgggcacggtgatggagctgctctgggcatggtgatgttgctgctttgggcatggtgatggagctgctctgggcatggtgatggagctgcattgtgcatggtgatggagctgctgtgggcatggtgatgttgccgctttgggcatggtgatggagctgctctgggcacagctccttgggggtcacttgatgcggacaggacgtgctgcggggccactggcctgtggcagtctggttgaagtccatcctgcctgaacttgggattgctctgagacatccgtgggccttgccacactctgggaaagcaggcatccatacgtcatgcgtagtctgaccatgtgggcttgtccaaaattactccattcttgaaattctgggggagcatccacaggctgccttcatcactgcctctgacattctaaaagggagtgcttaacttagagtcatgattttacgtagtatgtaggcatttaagggacatttgtattataacaaaaaaaggaagaggtgttgatgtccttggaaaagtgactatcatttctataaattcctgcccagttagtgtgagatcggagcacccttccctgccaggggcttgcttacactgtgctggatggtggacggggtgactgtagctcaatgctggcgagaccctctttctgaaatagacacattttagcaaacgtagtggagtttctcaagcatatagtgtgcctgtttgatatcttaaagcaaaagcatttaaaaatctttgtttagcggtttggttttgaacatgtgccctttcctggtctcatcacaaggtgggtagcatctatcctctgccttacacctccccaccttagaggaagaaaagcctgagcagctggctgcaggggccagacacctatggaactgggacaagagcactcgtgagccctgagtttgagactaaagccctctgtgacacagccttttatttttagtgggaagaccaggctggtgtgacacttaaaagtgaatttcaggactgggtgtggcaactcacacctgtaattctagcattttgggaggtcgaggcaggaggatcacttgagctcaggagtttgagaccagcctggacaacacagcaagaccccatctataaaaaaatagaaatttagtcaggtatagtggtgcacagctgtaatccaagctactcaggaggctgaagcaggaggaccacttgagcctgggaggttgaggctgcagtgagctatgatcatgccacttaccctccagcctgggcgatagagcaagaccctgtctcttaaaaaaaaaaggtaaatttcaggaagcagatttgtgacttctacatggctgctggtggtgacgtctgcattggtggtggtgggtgttttagggtcctcatgtctggaggatatttttccccacactgaaggcagcccacctgtgttcccctggtgcctgcacacatcagcctctcatggctcagttgctggctttgtgtgaacacagagacaatgtgtttgatttgggaacagctggtcacagcccatgtggctctgccccatgcttcacacatcttggttcctgcaaattccatgccccagcctggcttccggttcctgcttgtctctggagagccgtggttccagggccagcaggtgcctccttacagttggagtctgtccaggcacagcagagagccaggcccgcagagggggccggcagcctcttcccactctcctgcccaccccgcgcctgtgctctgcctcagccacaaggccacctcaccaggcagaacagatggcagtggtgagggctggagccctctgcagggcctgggaactagagggcaggttctgttctgatggccttttttcccaaggacatgacattcgcggggtcagccatgactgctgccccaagggaggcctgcaataaggcacccggtgccagcatggagccccattgtcctcactcttcctcctgggcctgtcccggtagagatacccggaaccctctccttctcctggcttatttcggggtgggtgtgtgagaattggctgtgagatgagtgacagcaggatgaaggaatttggcatctttagttcatctttatatgatcagcccctgcacccaagaatttcttggtggcgttcacactaagaagtgtcagagtgggcagagggaatgcattgggttgtatttcagtgaggggtctaggctgctgaggatttctctctggaggcctccatctggtcttgcatttctgaggctgaacagacacctctcatgatcagagatggggtgtgggaaggaaggaagggtggtgaactgggagccggcagcgcgtcccagcgctgaacccgtggcacctggctgcttggctgtgagggctgatcttccagtgcccgagtccccgctgtgagcgccctgaggagcatgtgtgtctccgcactatgccctcagcggccgctggagtggggctcgtgtgtgccctgcagctgaaggggaaggaggccgaactggccggggtgtccgtggttgggggggtacaggtgttgggagtgggaagcatttccagccagtgagtttagggatgctgcctactcggtcctatcttggagagcctcagtgtacctttagcgtgctggagacgccagtggtccttctgtacagaaaacctcagtgttatttaacccagaatgtcctaaatgtatgcgaacccagaacactctttccccacaactccagtcagcgcagagtaacctgtgctggaccagatgagcttgaaggagacttcccgctggaccattctcgaacttgagagtggagtagagggtgctgttgcatatttagagggtgatagggtgacagaaggctggggcttggggcgaggggggtggggaagattctcttaacagagctctggctctgcattctaaaattaagtcctgtgggtcacgtctgcacccacagtgccagcaggaaccgtaggggtggcctcatctcttcagctgaacttgcacgtgcagagacggaagctcaccttgtccccaggagccaagggtggtggcacaaaacgaccacgtttctgtcatgctcatgcactctttcctgtccctctccttaatggattgtaagtttcttgaagcaagattctttctgtgtgaattttgtgaccctcactaggccccattgcccatcgtgcacctcctgtggagtaagtgatggatggcctaaagaaaccatagggaccaggcgtcctctgtccccttcctttctctgcagggtctgaggtgggcgtcattgggcagacaggcaggagagctcctgggaggttttatgggtttgatggcaggggagggaccagccccgctgggcagccctctcctgaccgcctaccaagtgctgtcttaccctgccccaaccctcagtttccctccactctctccccctcccagatacgtacatataaatgtgatgatgtttagaagctgaagcatttgaataaatcagatgctttgcccaaccctgggataaaggctgtagttattttaacaacaacaacaacacagaccctgcagtcttcagctatttctggatgtggactggtaattagcatgccacttgtaattcactgctgtcgccggctgtttgtttccttgtttccaacgcagcccagtttgggagactgggtttatttcatttggaaatgtgattcagtggagacctctaaaatgccatcacaagattagtggttttctgtagccagagtttgccaaacctggcgtttgaagctcgatgattagttttcagcagctctgtgcaggggagtaacagcttgctgcgatggtatttcacttcagagaaaactgttaaaagcaactgcttcaagaagcactggcactacctggggaatgggatacttgagggggacagatttggggataggttaaaggaaactcacagggctttgctgtttcagcctcagagaccttttacattttcagttaaatacttactgatgtgcatggaggccaaatgcagatgagtgtcctgcatgaaatttattctgccccaagtggaaggggaatgtatgccctggtgagaaggttcctggaggccagaacgccttgctagctctgcaactacagagggaaaggaggaaaacatgcactgctgttacacgcagttatggtacatgcagttgttatgtttatgcagttatggtacatgcagttactgttacatgctgttatgttacatgcagttgtgttacatgcagtcatgtttatgcagttttgttatatggagttatgttacgtgcagttatgttacatgcagtgcagttatgttacatgcagttactgttatatgcagatttggagcccgacctgctgctgactgtaaaatgagaacttggccatggtccaagaggaaagcttttggttcctgctttttagaaagatttattgggggtaggctttaatgaatagacagattctttagacttctccagtggcctggggctgtctgccctgggcactcagctgacctcagagctgcccacagggaaggcaccggagggcaggagtgcacccctgcagggcacatgctggacagcagccatgtggtgcctagaccccggcccagatgtctcgtcagatccgttgagggggaaataggttaactttgtcttctgaagacaattttttttccctagaggcagggtctcactctgatgcccaggctgaagtgcagtggtacgatcatagctcactgcagcctcagctcctgggttccagcaatctttcctcctcagcctcctgagtagctaggactacaggtgcatgccaccatgccagctagttttttttgtctttcttcctttctctcgctctttctctctctctccccgtttccttccctgccctccttctctccttttctccttccttctttcctttcttgtagagaggggctctcgttatgttgcctgggctggtctcaaactcctgggctcaagcagtccttttgccttggcctcccaaagccctaggattacaggtgcgagctactgctcctgtccgagactttccttttgatgaaagaaaaagggagttattttctacatgagctaaatcttttaaatgaatccccctcctcctcactccccaagaaaaagagaaaggaagatgaaaaacccccaaaatagaacagaaccctcttaggaatgggaagcccatgcatctttctggggacctcttgttgaaggcattagctagataagcaccaggttctcctagtaagagggctaaggagatcctagctgctccataagatgtgatgaaaagaaggaatgagcttcagttgtacaaaggcccacgagtcatctgcaaactatggcctgaagtgttggtagacagtgcagttgtcaccaggaagtcatttctggaatttttcaggcaaagcaagcacctggaaggatttgagtagagtcctgcaccgccaggggtggatccagggtcctggggtctggtccccccgggaggcagccctgctgctgcagtcctggactccagtgcacaggctcccaggccaggacctgggcggcttcccggcttccacactcagggctcatcttggtggatgttgcacaggagttggaccttagatattcctagaggtctccacctctcagcatctctggctgaaaggtggttcctctgtagaatgttgtgactgtatggtgtgggcagcgtggggaaggggaggaggaggagttagtttttcaaagaagatttcctgagctcacagttggttggtactcacatgttgaagagtgcagagatgggagatggccctcttggtgctagtgtcaggtctgtatctctgtgttgggcctggcttggtcagaatggtctcgtgcagcagggatgacttcagggagtccccagcatgctgtcgcagcacaggctgtggggcaggccacctggaagctgctggggagggctgggaaggtggttctttcagactcccctgaggaatgaggccaggcagccactgccctgtatacaccgacacacgcttcaatccttgtcatggcaacatcagcccttttgagtttaacctgctgcaggtttgggcaatgggccccatttgttttggtttcaaattatgatattcaagaataatttccattttatgaaactccttgtcatggacacagacctgaagatgggagactgctaaacctggtcctgctgtgggggtgtaggagggatccctagggatggggacagggaagatgacacagcagacggaaggagtgtgaggaaggcagactcagcctgcatgcgtcagcctgctgacggagggcgtgtttatcatttcacagttgaaaaactgaaaaacttagttgactcttgtacaacatgggttgaaactgtgtgggcctacttgtatacagatttttttcaataaatatattggaaatttttggagattttcaaatatttgaataaacttgcatatgaatctcgtagcctagaaatattgaaaaaaattaagacaaagttaggcatgtcatgaatgcataaaatatatgtagatactagtctattttgtcatttttattactgtaaaatatatgcgtacctgttataaaaagttaaatcttatcaaaacttatgcacacacttacatatatacatggtaccatttgcagtcgagaaatgtaacgcaaacacaaagatgtagtattaaatcataactgcataaaattaactgtagtccattgctatactactgtaataattttgtagccacatctggttgctattgtggtcagctcaagttttttcagtatccacttaagacactatgtgatccttatcatctccgcatgagcagttcttctcaacagtaaatttcatgtcacagtgaaaaggaatctcttgaggttcttgcatattttcactgtatttcctgcaataccataagcctcgaagagcaacatgggacccaaacccataggaagtacccctagtgatgctggaagtgctcccaagaagcagagaaaagtcatgacattgcaagaagaagttgaattgctcgatttgtgctgtagattgaggttggcagctgtggttaccttttgccatttcaagataaatgaaaccagcataagaaccactggaaaaaagaaaaggaaatttgtgaagccgtcactgcagctatatgccaacaggcacaaaaactttgcactttttgcaaaatacctttgtatcttgtattgaaaatgcagcttttatatggtagaaggatggctattagaaagctcacctatagactctaataagatttgagaaaaagcaaagtcgttatatgacaaagcaaaagaaatgcaaaggatctaaagatggagaattcagtgccagcaagggatggtttgataattttagaaagagatttggcttaaaaaaaagtcaagataataggagaagcagcagttgagttcccagataccattaagaaaatcattgaggagaaagaatatctgcctctataggtttataaatgcagatgaaagtggtctattctggaaaaaaaagctacaaaggacatttattagtaaggaagagaagcagcatggataggctaactcttatcattttgtgcaaatgcagttgggtttatgaacaggacggcccctgagccttgaaggaaaaaggtgaacaccagctgccagtcttttgattgtagaacaagaaggcctggacagtgagaactcttttcctggattagttccatcagtgttttgtccctgaagtcaggaagtacgttgccagtaagagactgccttttaaacttctttcaatactggacagtgcccctggccacccagaaccccatgagttcaacactgaaggctgaagactgaaatggtctatttgccctcaaataagacatctcatatcagcctctagatcagggtctcaaaaggacctttaaggctcattacacacggcgttctatggaaaggataataacgctgtgaaggagaaccctgatagagagaaggtcaggaaaatctgaaaggatttcaccattgaaggtgccactgttgtaacagaaaaaactgtgagagctatcaaacccgaaacaataaattcctgctgcagaaaactctgtccagatgttgtgcatgacttcatgggatttgcaacagagccaaccaaggaaatcatgaaagagactgtggctatggcaaaaaaaataaaaaggtgcgccaggggagagggggaaggaaggatttcaagatatggatcttggagaaattcaagagctagtagacaccacaccagaggaattaacacaggacgacttaatggagataagtacttccaaaccagggccaggtgatgggaaaaaaacatagaagaagcagtgccagaaaataaattgacattagacagtctggcagaagggttccagttattcagactgcttttgacttcttttatgacatgaatccgtctatgaagtgggcactgaaactaaacaaacaggggaagaagaattggtgctgtttagaaacacttagataaatgaaaaagcaaaaaaggcagatggaaattgcagtgtgttttgtgaagttacaccaagtgtgcgtgcctttcctgtcccggttcccacctccttcatcgcttctgtctctgccccgcctgagacagcatggccaaccctgactctccctcctcccctcagcgtactcaatgtgaagataacgagaatgaagaactttatgatggttcacttccacttactgaatactaaatatattttctctttcttatgattttctttttttaattaaaaaaaaattttttaagagacagggtcttgcagtgttgcccaggctgagtgcagtggtgccatcttggcaccctgcagccttgacctgtcaggttcaagtgatcctcccacctcaacctcccaggtagctgggaccacagggcatgtcaccactcctgactaatttttacatttattttgaggagaagggggtctcactatgttgcccaagctggtctcaaactcctggcctcaagtgatcctcccccttcagcctcccaaagtgttgggattacaggcatgagctgccatgcctggcccctaattttttaaataacattttcttttctgtagtatactgtattataagaatactgtaagtatatgcataatacatataacattgaaaatgtgtgttaattggcagtttatattatccgtaatggtcaacaataggccattagtagttacatttttgggagtcaaaagctatacttggatttttgaccgtggagcgggctggcatccctaacctctatttaagggcaactatcagatggttcagaaataaaatcaattatcaaaggcattcattcatgcctgctgctgtccactctgtccctgccttgtctctgcagtcgtgtttcttatatatccttctagaatttctgtatgcatttataaacaactttaaaaacaaattagccacctccacccttcatcaagcccattttcctgtaccatgctttcgacactcaatgtgccttacagatccttccacgtccgcacacagaaagcttcccttttttcttgtcccacccgccgccccacacctctcctctgcctttgtttacagccatctggtgtcccatttaatagacatgccagtttacataaccagtcctctattgatgaacctttgacttaattccaaattttgctattatagacaaagtacaatgaataatatattttatttctcttaatttcaattctcaaacatgcacgtgtacctttaggatgaatttctgcaattggatgtgccaaggccagagcgtgtgcatttgtggctttggttgacatcaccaagtcgcccttcctggggcctgtgctggtgtactctgaggcgcgattgtgtgaaaggtgggcgaaggtgcctgttcgaccacatcctcactggtagactgggtcaccacagttttggaaaggtgagaaatggtatctaaacatagtttgaatttgcatttcttttactggaagggaggctgcgcgtgtttcacatcagagccatgtgtgtttgtggttgttgaactttctctcttggattgctaggagtgctttatgtattagggaagcagacttccctaatgcgtgataacgcatgcagatactgtttccaagtttttgttatttgtcttttaaatttgtttttgcatttgtcttttcactttgatttttgccaggctggagttttgatgtttatgtggtcataggtgtgaatattttcttttgtggcttctggattttgagacacagtggctatagaaccactgtagccaaaagttatgtttgcttttggtttcatatactttgctttggtcctgtcttcttgactttatttaaaatagtaagatattcttactacatttttccattgcccatagctggaaggagattgtaattatcaccaaagatgaaaaactaaggcatgttctcagcagaggcagattagactttaagttagaggcttgtccttggtgcagaggcctgtgagcgacccggccccacttgccctgcacaccatggcgtggattgtgggcagtcacagggaagacctctggctttgctgggagctggggtacggttcttagagtgccattctagagtggcttcgcgtactggtaatgaacgcccatcaagtggccttgggaattcatgagccggatgatgatgacttcgccggtgaaaagcaaatcccaaataggttgttttctgtgcattccagtcccaatttctcttccaagtaattattagatgtgccaagcctgttacgtttattacttacagaattgtttttgtctgtgtgagtttactgaggacttaggggttggtatgtgaggaggggagccccccttctcctgtgggcactctagcactcttaataatcagtattaaacatgttgaaggccataaaggaaataaccttctcttaaaaacaagttagagtcagtcataaaactgtttgcctagaccttgatcacttaaaataagatcttagatgtgatgtgtctttgtggagtatttcctgtggctcgggaggtgtgcatgagagtggggtctgagggacagtgaggggtgaaggaaaggtgggagagagggccttcagtgactgtaccaaagactcacagacactgggtgtcttggtgatgggtgcacatagcccttcttttgtgactgaagctgtgtggccttcatcccacagggtctgccctctccagataattctgtcactgaacttcaaactgtcaatggaacgatagcgcagtctcttaacaatgcttcaggacagataatagagctgtgcgggcagcctcggtgacagtgttgggaatctgcagaatggctttgtccacttctttcctttcagaggagacattgaacctcggcatggtgtctcacgccaggaatcccagcatgttgggaggctgaggttgggggatcggattgcttgaggctaggagcttgaggtcagcctgcgcaacatagtgagacccctgtctctaccaaaaaaaaaaaaaaaaattagccgggtgtggtggtgtacacctgttgtcctagacacttaggaggctgaggtgggaggatcacttgaggcaggaggtcgatgctgaagtgagctatgatcatggcaccactgccctcctccagcctgggtgacagagtgagactctgtctcttaaaaaaaaaaaagggagatattggtgggcctgcaaggacatgcagttggatagaattaggaccatgtgtagcatggtgatagacgttgtggttgaaaaggaaaaaagacagtccttgccctagaggttttgcggtataatctaatcagagaggccagcagcatgggtgtggaagaaccaggaaagccagagcagggctttgtggatgctgctgggggtatggagcaggcagtgacagctgcctggacccctacccgccccttcacctcctcttcctccctcagtcttgaccttagctccttcccaggaacctgagggttctgagtcactcactgtttgcatctggaataacagcttccaggtgggttttgagcatcagtttggttgtgtgctttgtcatgttttggcttatctcatttactgtagatcatctgagattaaatccataaattaatgtatttatttttccttattcttatattttacttgagaaattttgcagagtcagacttttgctaaggagatgatttgacatgttggaaagatgcagattctggatccagagagacgtaagttcaatccctgttacatccgctagcatttctgtagccttaggtatattacataactcacagagtctcagctccctcctctgtaaaatgcagaaagtgatacctccctcaaagggcagataaaggataagggcaaataaaaactctattgttggggaagacagaggatggatatggcctttcctatcttatatttcagatccattcattcatctgtccattcagctgttgagtccatgagagcttactgggtgcttctgagtaccaggacatgtaatgggtgggacacaaacacaaataagaccccatcccaccctcaaaaagccagacagggactgacttcagtctttgtcaggggtggatggtgggtgcaacagagcccactcaggcctcctggcacctgcctaccgatccaccctcatgtgaaagagtctttgtgcatcctggtggcggtgttgcgggtggcaggaagctctgatggccctccgggcttggcttctgccacactcccagggactgctaaggagtcgctttccagccgtgggtgacactgctggacacctctcagagtgtcctctgaggatgagtgtcatcctcagaacgccggccacactgggcaatgtttccagctggttgtcgccatgttctcaggggatatttcgtagaggtctttaaatgctaaagcattgggcattgtgacagctggcgatgctgctggcactgtgctcttgagggaaggcgggcctggatgtggagggtatgcccaaaggcctgagtccggaaaggagttctgcatttccatgccgcctgtggctcacctggaaaataaaaacctgtaggaatagttacaggctgagcatcactaagctgagaatctgaaatcccaaacaccctcaaatctgaaacttttttttttttttttgagacggagtcttgctctgttgcccaggctggagtgcagtggtgcgatcttggctcactgcaagcctcccctcccgggttcacgccattctcctgcctcagcctcccgagtagctgggactacaggcgcccaccaccacacccggctattttttcttttgtatttttagtagagacggggtttcaccgtgttagccaggatggttttgatctcctgacctcaagatccgcccgcctcggcctcccaaagtgctaggattacaggcatgagccaccgtgcccggccaaatctgaaactttttgagtgctgactgcaagtggagaattccacagctgaccatggtgccgggtggcagtttaaacttcatttcatgcacacaatcattaataatattgtataaaattatatgtgtaaggtgtatgtgaaacataaatgaattttctgtttaggcttctgcctcatcctgaagatatctcattatgtacatgcagatattccaaaatctgaaaaaatccaaaattcaaaatgcttcttgtcccaagcatttcaaataatgatattcaacctgtatatacttaaaggaccacaggaaggcatcattaacaaaacaagttgagggccaggcgcagtggctcacacatcaaaacttcaggatgctaaggcgggagtaccacttgaggccaggagtttgagatcagcctgggtaacataaagagaccccatccctacaaaatgtacagaaattagcctggtatgatgacatgtgtctgtagtcctagctactgaggaggctgaggcagaaggattgcttgagtctagaagttccagactgtagtgagctgtgatcgcaccaccgcactccagcctgggcaacagagtgagatcctgtctataaaaaaaaggaaagaaacaaaaatacacacaaaactgagttcaaggttaaatataatactacgcatttttcctcttgaaagtatatgaatgagataccttaaataatcatagcgaaaccacttgggaaaactcttcctaagcttcagttgcattatatgttctctgtgatgttttctgacccacctggactttgaaaagatggtaaaatattgtaaaaataacacggctctgtttgtgcgtgctttccatttttcttctttaccttttgcctggtcactgacttcgttaaggggaggatgggctgctgtgcgtgctgtgtggcttgatgtttgtaaggatttttgcaggtcacatgctaaagagggtcccacacttcatagaattttgggcggctagaaggatctgttatttgtacgtgttctgttatctctagtctttggaaagaagggcaggcttgcaaactttttgtgtccttatttgcagagtcctatttgagttggcgttgtgcacgtgacctatgcctgacctgcttggattaggacgccagcctaggttagccccatggcagaggctgaggtgttattccctagctctgactgcaagaaaccaattccttccccacagcccactcacacagagcacactaagttttcccataccttggctgtgtagacaagggcttcaagaaccattcagacgtgcccttgaacacttcttcctgttgcaagagcgtgcaagcttgagtcgtttttatctctggtgaacccggtttcccgtggtaaacagttgttttaagcactagcccacaacccagagcttcagaactgccttcccccgccaccgtcccccgcacggggaactcaagttaggcttcttggcccttacgtgtggatgtcatttgaacaagaacgttttgcacctattgatgtactgcgtttaattgtacttagctgttttcttagatctttttctctgtgaaatcatagggactttgaggacagtgacggtttctgcctttgttccctacacctgcaaaacatgtacctgtgccttgtgaaaatccagccaacagccgtgtgcgggggggtgcccacgcatctccttgatgacatattttagcgtttggattaaggagagtagtttgtttggtttttatttttatttttattttttgcagtttatgtgttgtgatgtcagaaagagagggaagtagaagaaagcattattattttattgcaattagatgtgaccgcaacacatttttccctgatctcagcacatgccttactgatactgcgtgaagagatttagtgcagccagtgtttaaatatcggtttctaaatggttggtatcaggtgaagaagcaacaccttcaagtaattttggtaatgagtttggcaatcagtggggcccgaggggagataacttagtacgatttatggtgattttggcatgtttcctaatggctctggatttctcagttacaaagtggtaaatcagaaaggagactttaaaagaggcaattttgttctgatttagtggaatattttacaaataagaagtaacaaagttctgtgagttattttctggaaaaattgtgacttatgtttttagattgttaacttgtgtcaaataatttattgaaaaagcgatttcttaatgttaacatttttctgtgatgtggctgcatgtacaggcacaccttggagatgttgtggaataccctgtagaccgacattcccacgcagtgatcttgaaaagctggacagagtacaaaagaaaggtggccaacactggagggaccaggtcctgaagaggagggaagctcatgggctgaacgcagtgttctgtgatgcttttcctcttgagatgtttgctggctcataaggggcatggagctggataggtgaagaacaaaacagaaagtggtgtccagaaaactaggaccatgcatggagcttgtggcagtcttgtagggctgggagacaaaacgtagagttttagctacaaaggctgtgtgagtgtaagagaccgagatcctggggagaagggaaaatattaaggtgagcctagtaatctgcacttgtgttctcctcaaggcatttgctgatgtgttagctcagaggctatgagaagggaaagctattattattattgttgttgttgttgtagagatgttctcgtacgttgcccaggctggcctcaagggatcctcctgccttggccttccagaatgctgggataacagatgagaattaccacacccagccagaaggctattcttaaagactaggggaaccaaaacttggagttcagggcatgccaaggaggaggagccctggaaagcacctagacttcctgttaggtcctgaccccaacctaggaataagagtaaacctgaaatagtttagccttcacaaaagaccgggactcagccttgaacccactcagttcagagaggattatggcaccctgccctgctctgcctgccagaaaccagagtcagcgctctctgaaggatgataacattggccagggcctccagttctcctgttagtttgtaatacacagtgtttggttttcaataaaaaattaaggtccaaatgattaaaagatgaaggagaaagagtaaaagccaacaatggaaacagcaacaggtgatgtagtttttggactaatgagatacagattttaaaagcatcatcattaatatattcaagaaagtagaggacaagatggagaattgcacaaataaaatggaatgtataggccaggcgtggtggctcacaccagcactttgggaggccgaggcgggaggatcacctgaggtcgggagttcaagaccagcctgaccaacatggagaaactccatctctactaaaaatacaaaattagccaggtgtggtggcacacgtctgtaatcccagctacttgggaggctgaggcaggagaatggcttgaacctgggagttggaggttgtggtgagctgagatcatgccattgcactccagcctgggcaacaagagtgaaactccgtctaaaaaaaaaaaaaaaaaagaatgtataaaactggacttaaatggaaattctgggaatgaaaaatacaataaatgaaatgaagaattaaatataaattggatagcagattgcacataggagagtgaactctgcactgtagattgacagaaaatatccagagtgaggcatagagaagaaaagaatgaaaaaatagaggaaagagcatgagagccacggagatgtggagaaaaggcccagcgtgcaaaggtgagggacggtgagaggagagagatgggggtgccagcaggatttgaagtgatactggctgagaagtatcccaaactctgtcagacatgaagccataaattcaagaaactttacaaactccaaacatggcaaatacacagagaaccacacctgacatgtcactgcaaaactagaacacaaggcaatgtggaaatgtagatggagctggaggtgcatctgagtgaaaggacagctctacggctgacagctgacttttccacagagatcatagaaatcagatgacgatgaaatgacagtctttaaagtggagaaagtaactcttttcctagaattctattcaaaaatgaaggccaccaaagggcattttcagacaaacggaatcagacagaacttgtcaccagaagaactatagtagaagaaattattagggaaattcttcaggcggaaggataaagggtcctgatggaagcatgggaatgtaggagggaatgcagagccacgtaaacagcaaagccacgggtggttctgagtggacagcgactacctgtcaccagcaagtcacagcagtgccttgtggggtgtgatgtgcaggcagaattaaaacacatgatggtaacagccttgagggtggacgtggagggtgggtgctgctgttgttagggaagctgttggagaactaatttctcttgggaactagtgagttaggacacatgttacaatctccaaagtaaccactaaaatactaataatgcatgatgcatgtggtgacagaggagggaaaactgaaccgataagaagtactcagtgaatccaaaagaaagtaagaagggagagatgtacaaaccaaacagatgggataaatagaaaacagatagcaacatggtcagttttcactcaaacacttcataattacataaaatgcaactgaactaaatatgccagttaataccgagattgtcaaactgaatatttaaaaaattgctgcttacgatagacgtgcttagatgaaggaatccagaaggcacgatagtgaaaggagggagaaggatgcccggtgcacacactagccataaggaagctggtgcaccaatgtcaggtgaagcagacatcaaagcatcgggcattgccaaagatagcagcttctcacagtggtaacaggtgaattcccaaggatgatagtttactgtaaaggcagggtctatagccacaaaaaagatatttcttaaattgcccctacacgtatcctaagctctcagggatagcttcaacctgtagagactcccagtttctttagcccgaagcctaaggtacacatccccaaagcaatttggatggaagatcctgacctgctcagctattcagatgatttttttactgaaagagtatttcatttttgtctcaattcattttgatggacttacagataagatttcttcactagaaggcattcatcacttaaaaaattaatatttgaaattggttatcctttatctttttaataaattgaacaattaggattggtagaacaatggtacacctgtctattttccgtgggtgccactgggaagaccttacagtattgttgaagtgtatctgttgaacctggcaacattcaaggcaggctgagttaaagaaagcacgtcacaagacagtatgtgcactgtgatcccacttcagttaaaaatgtgtatgtttatattcatatagagaaaagtctggaagaataacccaaaatataagtaatgtttctgtctgagtggtgggattatgggtgattttatcttctctgtttatttctatttttgtattttctccaatgaacgtttgttactcctataataaaaataaaagccatttaagaaaaaattttttatcatatgacaccaactgtttctactagaggaatctatgtcttcttttaatctttatcagtgtacacagttgaatttcacattatgttaaatatttgtctctctgtgtcatctggaatagaattttctgcattaccgtgtggttgagtatacatctgccactcgtccggtccctcgcttcctgtccttgtgaagtcactgttccctgagtgttgtcagcactgggagggttcagcgcaggggtcccttcaaggcaggaccgctcacctggagcttccggctttccctgcgcaccactgcctccttcccctgctgcctgtggccatcgctgatttctggggatggagctttaattcatagtgaaatcttttttttttttgagacagagtctccctctgtcgcccaggctggagtgcggtggcatgatctcagttcactgcaacctccgcctcccgagttcaagcgattctcgtgcctcagcctcctgagtagctgggactacaggtgcatgccaccacacccggctaatttttgtatttttagtagagacggggttttaccatactggtcaggctggtctcgaattcctgacctcaggagatttacctgccttagcctcccaaaatgctgggattcatagtgaatcttaagtgtgacctcataaaatagaataaatgcccatccataagactaaaatttcttgtgtttttctccttctgagtttaaaatggcactggatgacaaatggaaagcttgatgctgctcttaatgtgccgctaggcattccggggatttcaaagccagtggacgggaggtggcctctgccagtgtctgtctggtgtctgtctgtgtcactgtggtgctgcctgggccacagacctaggcaggaccctgggtgatggagctcctgtctggtgggtgtgtgtgggcagtgctgttcctgtccacgttagaaaagccctcttactttacactgagtcatgctccctctccaccacggaccgcagtccccttccctagtgactcgctgtccccttcctttgttgcgcagctttctggctttaaatgaggagagcttaagaatggatggggagctcagcactcacagtaactgttggtgaactcagggcctgctacgtctggaacacatcaagccatttagtgggtgaggtcattcactgtttttaaatgctgctgcagctcttatttctcatgaagccctttatacctattaaatacttcatagtattgattaacttagctgctgctcctctctgtcatggcaccttttgctcatgtggactttatggtgcagaaacacgaatcgattgtcgtaatgaacaacacccctctgaagtggccacggcgggtatgattcgtcccagttcacgggcgagtaacagaggtgcgcagtggcggggcagctggcccaggtcgtgcagctgctgtgcgtgagccagctcgctcctgagtttccttttgtttgacagcattttgtttacagacaccacaccaatccttggtcttggatacatcagaaaagttggagttctagaggtgggtggaggcaggacttgtaccctctccctgcagcaaagacaaattcattaagcatttggaacacttgttaagttcagtttgtctctctctaaaagttatcactagatgactctctcatttttgtgtgtgcgtgttttagatttgcctgtaacttacgaccagggatactggctttctatttatggtagtaatagcagttctccttttaaataaacttattttcagccaaaagagtgattaggtctatcaaaaaatgataaggaaataaacagtacagatcgtctatatttatggcaaaaaccatgaaaagggcattccaggggctgaattttggaaaccccgcatgagatgacctttgaggtcaatatttccgggaacagttgcctcatagctctgagacttacgatttaaagctcaggtcatgagacattacttgaggccactatgtctcatttctattataatttttataataaatgattccttgactgatatacccaagggaagaaaggatgaaaaaccaaaaccaaaaaactatgtgtggcctattcacagagtataaaaaattatgttttgagttgaaaacagtgttgtctgcattgttgcaggaatcatagttgactccatcctgagatttcaactttaggatgagataacatattttattgcatatctgatcataagatcttctgtagttttatacatcgtttctgtttacaagagagaatgctgcgcctctgagggaaaagaatcattcgcaagtcttttagctgcatctctgacttggcgaatcctgctttcaagattgcattagtcgtattaggtgactgacactgtgaagtcctgtgttgacgtaatctgttgccttttctttatttttacgtttccgctgcctctcatctaggaaggagccttatgaatgaacacattgaaaagtcatcctttaattgagggaagagactacttttaaccctgtctgagcctgctgctctccccctgggactgcagtgaccagtgctctcaaactgcttggcataattccttatggaagagtgaatcccctctgatagagggtaatcctgactttgtttgaattcttccagtaacagagagctcagcctgtaagaaggtggcccaagttgctttctggacacttgtagttttagaagcatcttctgtcctgtgacggtgaggaaggtcactgcagtccccaacagtgaggctcagcacaggctgtgggaatcccgctgccaggtgcaatggcagggtggagccggggagcaatggggcaactctacgtttgagtaacgtgtgacgtgttgacctcattgttccctgagtgtcacaaatgcccatggcatctggtagaccgtgttcaagtttaattcaggagttcaaagcctaacaggattgttgtcattccctcccagtgggaccctccagaaggtggctcctctccgtgactggacataacaagccacgcctgtgtctgcaggtggggaaaagtaaattggaggccaggcatgaatgcactgtttcagtgagccctagtgagttcagtgtggagagcgtagttggagatacttggttttgcagctcccccgccctcttgtgttgatgaaggcagcaagcagaggtggttaacttcggcccgagcatgctgcaggactccgagagactggctccctgggtcttctctggcccagcagacaggctgcctgctgcagacaggccggtctcctgcccctacccgccgtctgcacactcagccctgcatctcccccagaggcctatgcgcggtttggctgcccggccaggttcctcctgaacattatgagtctgtgatttcagatgtagctgcaaacgtttccaaagcctatctctgggcctatcgccgtgtgatgttttaaaaccatagtttatttggctttttgtggctatttaattctcttcgggactcattcatctccctcaaattttaagtggttgtttacagctctgaattattttctttgtgtcctcttgtttctagtctttcccattcaattttacagctatcaggtttggataattagaatggagattcttcttccaaaaataaggtattaagaataaacacacaaggctgggcgtggtgactcacgcctgtaatcccagcactttgggaggtcgaggcgggtggatcacctgagatcaggagtttgacctggccaacatggtgaaaccccatctctactaaaaatgcaaaaattagccgttgtgtggtgatgtgtgcctgtaatttcagctgctcgggaggctgaggcaggacaattgctggaaccagggaggcagaggttgcagtgagccgagatcgcgccattgcactccagcccaggcaacaacagcgagactccgtctcaaaaaaaaaaaaaaaaaaaaaaaaaaaaaaaaaaaaaaaaagaaaagaaaaagaataaaaagaataaacacacagacttaaaaatctttatttgtgcagaaagcaattgaaagccagaataattatatttagaattttttttttacaaaaaactagcaatgcttgttctttttattgaaacacagaaaatattaattcacagcatagaaaactttatcctaagaaaaaaaatctagtggtgatctcatcagagtctatgttgtattgcgacacacttaacataatttgaaaattacttctttgtgaaaaattgtctacattatcccttcttaatttttttatgtaaggacttttacttcacagctgatttttaaaatggctctcacttctttatttctattatttatttaagccagtcacttttctcactttttttttttttttttttttggttttgagacagagtcttgctctgtctcccaggctggagcgcagtggcgcaatcttggctcactgcaacctccacctcccgggttcaagtgattctcccaactcagcctccccagtagatgagactacaggagtgtaccacgacgcccagctaatttttgtatttttagtagagatgggattttgccatattggccaggctggtctaaaactcctgacctcaggtgatccacctgcctcagcctcccaaagtgcctcccaaagtggcgtgagccactacacctcgcctgtcatccatgtttcttttctttttcttatttttttgagacggagtatcgctctgtcacccaggctggagtgcagtggcgcgatctcagctcactgcaacctctgcctcccgagttcaaaaaattctcccacctcagcctccccagtagctgggactacaggtatacaccaccatacatggctaattttttttttttttttttttgatggagacgggattttaccatgttggccaggctggtctctaactcctgtcctcaggtgatccacctgtctcggcctcccaaattgctggcattacaggcgtgagccactgcaccaggccatatttctcacttttttgtactcggctgtaccccttacagatggataatgtaaatttgtgtcacacaaacgctttgactcaattttctttttcttcacaaatagttacaaaattggtagcagcatctctctggatttctacttttatgaagcttgctcagggagaagcaggtgggaagaggagtagtagaaagaaaaccacgtccttctcactccacagaaaaagcttttgttttttagaaatttgccttttaaaagataggtctttatccatttcacttttctgcatacatttctttttgtagacacaggatcttgctttgtgccttggcctcccaagtagctggagctatgggcgccgccactgcgcctggctgcagcatgtcacgcatttgctttcaccagggatgcccctttttatcctcagttcctgaaagtgagctctcgtgctgtgaaaatggcaggactggtaattaggagagggctggatgtgggaaaaggaatgaggatagtttttgcgtcctgagctggaaatagcaaatgtgttcacattctttgctcttttcttgcttccaagtcaggtccttatttgacagggccgtgactcaagtgaggtgccacgtttaaggaggcgccaaactccaaacaaaacaaaacacccctcagtaactgagttaaataatactttaatgtaatattaaaagtatggaaattatgacagatgtgcgtgatgaacaaagtattcagcatatgggactgtgactattgttcaatatatataaggtataaggatttccagtgaatactctgaaatgtttggttaatctattcatattggtatttttccttggtgaacatttgtaataaagaaggaaataagttcagagaaggatataatcttcaaaaagtcatcagagttatcatctgaggtcaggagtttgagagcagcctgggcaacatggtgaaactccgtctctactaaaagtataaaaattagccgggtgtggtgtcactgcctctagtcccagctacttgggaggctgaggcaggagaatcgcttgaacctgggaggcagaggttgcagtgagccaagatcgtgccgctgcactccatcctgggcaagagtgagaaaagaaagtcatcaggattagcataccaaatcttgacgatgaattacacgtgcgtggctccattaaccatcttgagttcaagtgtctattttttttttttttgagacggagtctcgctctgtcgcccaggctgaagtgcagtggcacgatctcggctcactgcaagctccgcctcccgggttcacaccattctcctgcctcagcctccccagtagctgggactacaggtgcctgccaccacacctggctaatttttcgtattttttttttagtagagatggggttttaccatgttagccagtatggtctccatctcctgactttgtgatccgcctgccttggcctcccaaagtgctgggattacaggcatgagccaccgcgcctggcctcaagtgtctattttttgacaaggttctgaaattacgaactctctgagtatgtcccgaggaccttctatgcgcagagaacagtggcagaacggggaagagggagaagcggcctgtgggtttattagctggtggcttctcgcaggagcacgttgactctgaggccaggcatccgggcagcaggggaggggctggcgtgggctgctgctgatgatctggaacctccagtccctgtctgctgtaaacaaaaaagtgtctgagacaggtctcaatcaatttagaggctcattttgccagggttgagggaaaaagacacacacgtcacagtaggacccaaaaagggtttcgacaacttcattatttaaagaggaaagagcagacaggaggggaaggtggaaagaaaacagcagaggtaggtggtgaggtgagtggtcgcattcttgtgaggctttgattttcgctcactgaatacatgtgacatgtgaaaggaggggtagagggacgtcaattacgcatgcgtctcttgttcagtaaatctgcattttacacgggataaagtaaacatagagtagaggaagaagtcatgtacacatttgtctcagggcggcagagggatgatttctggtcttgtctttgtgccatgcctgccaagatgagctgttaacttacattgttagggtgaaggaggcctcctggggagacacgtggccttctatcttgcagcaatctgtataggaataaaaggaaagtcagctttttgcatccagcttaacttttccctttggcatagtgagttcggggtcccaggattttattttcctttcacattttgaagtgacacttgcagtcgtggctatggacttctcagggaggccaacagcagagctttgatccctcaaggaagacgcagagtaggatttcaagaggtggagatgcagagtgcactaagcctttgagacggctccaaccagagttctgcccagtccactcccttggtggaaaaccagctcccagacccacctggcaccacacacacctcccctcgctgcccggcctgactccatgacttgcagtccgcccaccccctttaaagggagttttggggccactccctctccttgcttcctgtggactcctcagctgctcagtgcctcctctactctccctctccgcgtgggcaacgctgaaggccctttccaggccgatcccggcactcagcttcgctgcgcacccgcccgtctcggaactgctgagtactctggagccaaccccagtttcctcatctgtaatgtggggatggcaatataaacttttttcctttttttttttttgagacggagtcttgctctgtcgcccaggctggagtgcagtggcgcaatctcggctcattgcaagctccccctcccgggttcacgccattctcctgcctcagcctcccgagtagccgggactacaggtgcccgccaccgtgcctgccaccacgcggagctaatttttttttgtttttttagtagagacggggtttcactgtattagccaggatgttcttgatctcctgacctcatgatccgcttgcctcggcctcccaaagtgctgggattacaggagtgagccaccacgcccggctggcaatataaattttatatggtgacatgtggctgatagctgagatgagtgactgaggcagaggtctcaattgttgacgtttattaagccagctttagggtgcatctggaaaaataccagccacagacacatctgtatctatttttctaaagaggttttcaggaggcttagtatttgtatgtttccttaaaggggggaaggctcggaagaggggcaggtgggctgtaaggcgaatgattacattcttgtgagactctagttagtgccagtaaatctgcattttacataagataaggtgaatgaatgtttgaagagaaaaaagggcgtaaaggaagaatcaattatgcagatgtctctgggcaggtggaggaatgactgatctcatcttgtcttttttctgcacctgggaagcgaagcttgtaatagacatgatcaatgtggaatggaacagacttcagttttaacctagaatcagattgtagacgtgaagttacaatgagatgttcttgtttatgggatgccagcaaagaatttacttaggaatgatctatggggcaacccttccagacccctgaggctttcacttttctgcggggtttggctgatgcctgatgctcctaacagctgttcctggggaagagggcattgcctggctcaccctcttggcttaactttcccttttgcgtaaggaatttgggggtcccgagctttttttttttgtgagatggagtctcgctctgtcacccaggctggagtgcaatggcacgatcttggctcactgcaagctccgcctcccaagttcacaccattctcctgcctcagcctcctgagtagtttcctttacatggttaaatgagaccaagtgcttactgaagtgtaaaatagcaggtgctgacaggaaaggcagacatctttttcttctcattgtcactgttaccatcatcaatacgctacttccttggcatctgggtctccctttgctttgggaaccctcctcttgtgctttcctagaagtcagtgtcttgtcctgggctgttgcttttctgcttgactccctctgtgggccgtggactctgcggcagagtcctatctgcagggcttctgcatggttatccattgtcttctgaagaaatgatgatgttagtgatggagccactttggttagcgttttgttaagtatgaacttgtgaatccttcccacagctgtgcaatattattacctccagggcacagcatctggactttaattgatgatgagtgtatgtggccccaagggacatggggcctcgaaattaaggaaggagctggaagtagtggacaagcagcagcaccaccacgtggaaaggtgaaaagttggataaggactggctgagaaaatgccatcagaatagcaagagggggtcattgttgaagagcacagcttcaggcaagtctttgaaatcaaagccagatttcaaggaagtcggaaggagcagatggagaggaagtggagagatttccatatggtgcgtgtatttttttttttaattaaggattttggtgttaaatggaagtggtacttgatggcctagcaggatgaaacaaagtttgtttctaaagatagagggacatgggctcacttttaaagagaaagaaagtaggtggccattgagttatgagaggttgagaagccggagatggtgggcccagagacccacagagcaggctctttgagagcagcaggtcttcctgctcagggccttgctggtgctgtcacgagccatatcccctggcctcctgctttgcttctgggctgtcatcaatctgttttgtggtgttctctgagaaatgaaattaaatcctaagctcccagccaaatgaatggaccccctcttggccaaggggcacccaaagaaaccttagaactgagtcctggctgtgacaggaggggaaacacgcctcatgagacccccacctcgctgaccaccatcaggctctcctccctgcgggctagaagctccatactcatttcagcaacggcctgatgctgtccctcccttttgtggttttgaccaaacaactaaccagcattctcttcctgatacaaagccgctgaccttggagtggttctggtgagtctacagaggaggctcagtgagggttcttgtgtcctctgcttcaccttttgatgtcacatggctaaaaactccatccttggatcatgctcatgccaccattttttaaacatgggtcccacagacagagaggcatgaagctcagtgtgcatgtgcctgtttctcctttcataaatattcatgactcctcctagagctcattgaatatgcatatttggcagccccattcagcataaatccctgtcttattcttcccacccttgaagtgcctgtttctggcttctggccggaggctacacttcccagcctgtcagaagagccacctgcaggctgcagccctttctgagaaataatgccctcctttccaaatgcatgaacttcatcattcttcagctgatatgtccttatcccatgtagaaggaaggatcttagtgtttattgagcgtcaactttgtataaggctctgggctatcttatatgattgtcacaataattttagaatatattaatgtgttcatttatacctttaatttttaaaatttgcgtttttagtcaagcagctcaaaaaacatataaaaagatgtttattgaaaagtttccctcctatgcctattctccatccatccagttctcccacttcccaatatttagttgtttttattattttcttgtggacacattccaaaattttaagcatataaaataaacataaaaatattatttatcttttatgtataagttgtggagtctatatacactgttttacaccttgctttgtttcacttaaagtttaccttggaaatcctcacatatcagttcacagagagcagcctcattctgttttacagttgcatagttttgactggattgaatggatacaccagattttttaaccctgtgttgtatagatagatgtttgagtagtttgcagtcattatatattatgtacacatattttcccgcatgtgaaaatgcatttgtaggatacattcccagaagtgaagttgctgggttaagggtatatttatttgcagttttgagtgattattactgaggcccatctttaggcttgcaccagttcacacaatcatcagcaacatactagaggcctgtttctctgcatctttgccaacagagcatgttatcagttttttaaaggtttctgtcagcctactaggaaaaaaagtaatagagttattttaatttgcatttatttttattatgagtgaggttgtctttccacaggtttatgagctgtttgtatttcattttcttttactgtctggtcttattcctttcctcttttctggccagatcattggtcatcttgtagatgatgtggtcaaatctatcagtctttccttttgtgacttctgcatttacagttacagttagggagcatctttcaaaattataaaggaattcttccaggtattctattacttttagaaagtcatttttttcaaacaagacaaaatacccaaatcgtttatctttgaaatttatcctgctgtggtatgagttacggatccaattttctcccctaaatgttaccaattccaatatcatttattgcctaatctgtcttttactcactgatttgaaatgctgcctttaccatacactgaatttctgtttgcatttgggtctagttttagattcattattctgattaattggcctgacttcttgttattttaaccattattcttttaattagtctattaatttttgaggctttctacatgtatccttatctgatgtaacttccactccctccaattttttttttttttgagacagtctcactctgttgcccaggctggagtgcagtggcgcgatctccgctcactgcaaactctgcctctcgggttcacgccattctcctgcctcagcctcctgagtagctgggactacaggcgcctgccaccacgcccggctaatttttaaaaatattttttagtagagatggggtttcaccatgttagccaggatgatctcgagctcctgacctcgtgatccacctgccttggcctcccaaagtgctgctgggattacaggtgtgagccactgtgcctggcctcccctccagtttttttagtactacttttttgttaatttttccactttagctttataatcaagcttgtctagttttcaaaaatgtggtattttttattgtgatcataatacattatacatttcagagagttggcatcttcagggtgttgagtcttcctgtcctaatcctcgtgtatcttctgtttcttcaagtcttcttttgtgtctgttgtttctgtagttgtcttcagaaaactttattaatcttattggtggttattcctggaaacctaatcttttttattgctaccgtaaataggatctgattatttgtagcctacagcaattatttgcaaatagctatctgtgatattataaaatatgtgtttggtcttcgaccccttttcctgacatacaactctaaaaatccttagaatctccacagtgatgtcttttgtattttaatgaccgactgatgggtggcagcccgtagatagctccaagatggggctggtcaccagaaagaccaaggcattactagaagattggaaccttcagcccacccccaccctccagggaggggagaacaggtgaaggttaagttgatcaccagtggccaatgatgtaatcaattatgaccatataatgaagtttccataaaaacccaaaggactggggtccaagagcttctggatagctaaacacatggaggttcctggagggctgcacccctggggagggcatggaagctccatgtttcttcccccatacctatgcatctcttcatctgtatccttcctaataaatgctgtataataaagcagtaaaggtaaataagtgtttccttgagttctgtaagctgctctagctagttaaacccaagaagggggatgtgggaatcccgatttatagcttgtcagccagaaggacaggtcacaagttgagggtagtcttggggactgagccaacaacctgtgtgatctgatgctgtctccaggtagggagtgtcagaactgagttgaattggaggacagttcacccagggggtgtccatgcagaactacttgcttggttggtgtgtggggaagccccctccccacatttgctctcagaagacttctgtgttgattgttgtgttgtgagagcagaggaaaagtttgagtatttttccacaccatgatgttaaaagaaaaagaaagaaaaagaaaaaagagaaaataagccctccagtttctttctgtaactgttatctgaccacattaattagtacctccagtgcagcgttaaaatacggtggtgatggaagtattcatgttttcttccgagttttgcatctggtgtttattaaacatgatcagtgtaactaattttgataataaatttctaatgttgaactatgttttcatttcctaaataaactgcacttgattatgttttgcccttaatgttggattaatcttgcaatgctttatgatttttctactgactataaccatgaacagtatactttttgtttgctctgttaggctttaatatcagtgtcatttgtacttcttgtaacaacttggaggtttctctgtttctcttttctagagaagtataagtatcttcggaattttcttttattaaaataatttttatttagagccaagatcttgctctcttgcccagactggtcttgaactcctgggctcaagtgatcttcctgcctcagcctcccaagtagctgggacttcaggtgtgtgccatggcacctgccagatggctttagaattgtaagtggtagttgacttctccagagaaactgtcttagcgctctttgcagggggtgggtagcctttgataatcttctctatttcttcctgtggaattgagttcaaatagcttggtacaacaagttttggtaaattatacgttcttagaaacttcattttattcagaatttaaaatttatttgtagcaaggtgagcaaaacacaaaacattcttttttgggttgaattttttaaaagtattttttagagcagttttaagttcacagccaaactgagcagacactacaaaaattttctcatatacctctcacctttgcataaccagcctcctccgccatcaacatcccacaccacagtggtacatttgttacaattaatgagcccatactgaaacatcatcactgaaagttcatagtttatggtggagttcactcttggtgttgtacattctgtgagtttggacaaatgtttaatgatgtgttcaccatcagagtatcatatacagtagcttactgccctaaaaatcctctgtgcctcacctgttcatctctccctcccctcaacctgtggcaaccactgattctcactgtctccatagttttgccttttccagaatgtcatatggttggaatcatagagtacgtagcctttcagagtagcttcttcatttagtaatatgcgtttcatgttctcctatgcctttttgtggcttgatagctcattttttttgttttttttttttggtggtgaataacatttcattatctggatgtaccatggtttgtttatccactcttctactgaaagacatggtagttacttccaggttttggcaaatatgaataaagctgctataagtgtccgtaagtaggtttttgcatggttgtaagtttttaacttttttttagtaaataccaacgagcgcaattgctggatcatatgctaagagtatgtttagtttttttaagaatctgtcaaactgtcttctgaagtgatggtaccatgttgcattcccaccatcaataaatgagagttctgttgccctacatccttgccagcttttggtattgtcagtgttctggatttcggccattctaataggtgcgtagtggtatttcattgtgtttttaattttcattttcctgatgacctgtaatgtgaagcatcttttcatatgcttattggccatctctatatctttgagagactatctgttaaagtctttgtcctatttttaaattgggttgtttgttttcttatttttgagttttaagaattctttgtatgttttggataacagtcttttaacagatgtgtcttttgaaaatattttttcccagtatgtggcttgtgttctcattctcttggcattgtctttcacatagcagaagtctttaattttaatgaagtctaggttatcaattatttcttttatggatcatgcctttagtgttgaatctaagaaattgttgccattccgcagatcatctcctatgttattttctgggagttttatagtttgtgttttacattgagttctatgatctgtttagagttaatttttgtgaagggtgtaaggtatgtgtctaggtttatttatttttgcatgagcatacctagtagttccagcacgatttgttgaaaatactgtctgctccattttattgcctttgctcctttgtcaaagatcaattgactatttttatatcagtctctttctggaatttctattatgttctcttgttctatttgtctatttttcatcaataccacactgtctccattactgtagatttataataagtcttaaagtcaggtagtgctagcacattgaatttgttcttcttcaatattgtgttggctactgtgagtgttttgcccctccttgtaaattttagaatcagtttgttgattcccacaaaataacttgctgggattttgattgcaattgcattgaatctattgatgaagctgggaagaactgacatgttgacaatattgagtattcctatccatggacatggaccatctgtccatttatgtagttcctcttttatttctttcatcagagttttatagttttctccatatagatgttgtatatattttgttagatttatgtttaagtattttcttttgggagtgataatttgaatggtattatattttaaatttcatatttcatttgttcttcgctggtctataggaaagcaattaccttttttatttcttttttttttgagatgaaatttcacacttgttgcccaggctggagtgcaatggtgcaatcttggctcaccacaacctccacctcctgggttcaagagattttcctgccttagcctcccgagtagctgggactacaggcatgtgccagcacgcctggctaattttttgtatttttagtagagacagggtttcactgtgttagccaggatgagcttgatctgacctcatgatctgcctgccttggcctcccaaaatgctaggattacaggcatgagccactgcacccggcctcaattaacctttatatattaactttgtatcctagaatcttgctatagttgcttattagtttcagaattttattgattcttctggattttcttggtatctgtacacaaagacagttttatttcttctttcccaatcagtgtgccttttatttcctttccttttcttgtcttattgcacttgctagggcttatagtacaatcttgaaaactagtggtgagaaggatgtccttgccttgtttctgatcttagcaggaaagtttctagtttctcatcattaagtatgatattagctggttttttgtagatgttgtttatcaagttgaggaagttcccctcaacgatttcttttctgagaatgggttgaattttatgtcatagctttatctgaaaagtttttaattgataaacttagctcatttacattattgatatgacaattatgttttatctaagttatgtcacattttatattttctgtcttatagttttcaagtctttttcattatgtgacttattatgctttcatgttttgtctgagttctgtcatgttttctgtttttatagtttttaaagtggtttcttattgggcctattttaagttggtaagttgatgtttttgatatttgtatttttcctaatagtaacctttttgattataactttagggaatgtcttcactcctctggttcgttagagggaagcttctaccatgagcattggtgtcgagcacatgttctcttccttcctatcccctcactacacgcccttacttgttattagtcagtttattagtatttactgtcatactgttagatatcttcatatgtatattacttttttcatcacatttgaatgatacctgttgattctcagccactagggataaggcagtcagtgacattaccctgtctcccaccatcttttactactctcccccaacactacaatttttgctggttgtatgatttttacattgtcactagttattacatttagatttggttgaccactttaatcatcacatttgttttaatcttagttctatagttaaatgaattcaattgccagttcttttgcttttattttcctgattgtctcttggattcattgggtcaggaattccggaatgcctgtgtgttcaaaactgttagtcagtggtctttttgcttgaaggaatgcctggctgggtataaattcttggcttatactttatttgcttaagtattttaagtatcttgaagcagtaacatatggatttgtggcatagagtattactgtgaagaaatacgtggctagtttaatgcatttccttcttatagatgacttgatttctttttctttttgcctaattacttagtctgtgtagtgttactataaagtactacctgaggctgggtaatttacaaagaggtttatttggcttacagttctacaggctgtacaagaagcatggtgtcagcatctgcttctggtgagggccccagaaagcttccactcatggctgaaaagcatagtggagctggcgtgtgcggagatcacacggtgagagaggaagcaagagagtgcagggaggtgcctgactcttttaacagccggctcccaggcagctaacagagtgagaactcactcactagggagggcattaatctattcatgagattccaacccgaatcaaatgtcagcatgaggctcggaggggttaaatatccaaaccataaacatagcccagagagttgttctttatctttaaagtcagatttattaagtccaattttactagaatattcctggttgttgactgttctgggtccattttggaatggcctgggtgccttttcaggatgtagatttaaatctccttgtatttaggacatttttcttgaataatacctttaaatatttgtttcattctattgcttgtttttattttgtaggaattctttttatgcatctgttgactctcatttgtcattcatccaaacctatcattttcccccatcctttttccttttcttttacctaagtttcaatttctaggcttttctaatccattcctctacccctttctttggattctgcaatacctattctgtcttatgctcatttgaaattcatcttcatttctgtgacttttttcccctaagtatttcttttctgatctcttctagttcatattctaccttttctttttttctcactattttttccttgagttcttatatttgtgctctgtggtgcatccctccctctcttctgtcttcctccccctctctctctttcaaggcgattgcctcattaagttttaaacaatgacaaaattttggtcacagctttcatctactcactagcaacattctagggagtattcgtctattagtaagttttatggctttctttcactttttttatagaataactttttattgcttttccaattccctttttattactcatcattgagtgagctgggttttccaagaccagctttattcaagagatactgtgatatggagaagcttccaggatggctttccaggctttacaacccagagcctctctccatctctgatgcactagagagagggctgttttcctacaaatgtaatccatctctgagattttttaaatggtcttgcctctgattcttcgaaatgatataagtcctggagggcttcagtcccattcgcgcactcatacttgcaatcatggactacagccgtgtctttcagggtgtgttcttcaccttcaagcatgcttttgctgatggtgcttgggatctttcatttctctgtgctctttgcagtttctgcccaatctcagctgcctctggcagaccttacaggtacttggaattctggagattatacctgtctcctagttccatggaaaatggagttcaaaaattccacgaaacttttttcattgtctttttgcttttgtttgatatcgagaggaaaggaaaaagttctgtttgtccattttgttacagataaggaaagtggtttcacaaaggttaagcaacttgatcagtgttacccagcaaagagcagaatgattttcaacattcagtttaaaagtcggcggggggcagtggctcacacctgtaatatcagcaacttgggaggccaaggtggtacggtcgcttgaagccaaggagttcaagaccagcctggtcaacatagcaaaaccttgtctttacaaaaagtaaaaaaaaaaaaaaaagagttagccaagtgtggtggacctgaggcaagagtttgaggctgcagttagctacgattgtgccactgctctccagtctgggtgacagcacgaggccatctctaaaaaaaagaaaagctcatgctctttcactataccatggtttcttcagtgttggagatacagtcacagtggaaagcagttatggagtcaaagcaactttagtcttactgggtatttgttatagaggtagatgtatttgagtagcaagttatggttacagaaaatttttgtgccttcagttaagaactttatggtcacctacagcttcaagttaccccttttcccttctctttcccttctccttactgctgtgaccccgaagggagaaatgtatataggtagacacgctctctattctcatctgctgccttgctcacaacttctctgaatgcaactcgtgcttcatatcatccaccatgtttcctttctattctcccttgatttttctttttcagaattgcacccattgctatatgttctcccctgttttgtttaaggggtcctccagtagcactgttctctggaggtcagggatgagtgggtaaaatcaggtatcttttctatccaggttcccaagttgctagtggctgagcttcctgaaacagagagatccgaaaacagttcctgctgttgttgactcttgacagaggatcctcagctctgaccactgctgtgcccttcttcagtgtagcgttggtggatttgtttgtgaatgtttctgagagtgtaaaggttactatcacacatatgtttactctgtaaagataaggttctggtgaaaatagaattgaactgtgccccatcctctgtctttgcatttctgtgaagaacacagttcagtttctaaaaatcactggtggtggccctctgtatgaaaaaataaggcttacttcttgacacttaaggtcattggaggatcatacttaattgtttgaacatatgagtcctgtttacacattctggctcgtgtgtttttttgtttgtgtttagctgggtagatttgtgagagactcagggtgcagaagagagggagaagatgatgctgttttaaaatgatgctttccactggttgtttcctctaaagaagacaacggtgagtccaggggagctgttatttttttgcttagggttggaaggagggaaaagacaacttctttttaaaaatttataaaatgttatgtatttttgtttatgcttaatttatatctgtgacatggaatttgagcaaagtggccacatatttttgtagggaaaaaggaggcatctgatagttttattttccacattttagggactactttccattgcagcttgaggctttcactgattaaaataatggcttttcaaaagttaatgtgttatatagtgagcacataatctctttaaatctgttatccttctgtagtatcactacttttttttttttttttaagactgagtcttgctctgttgcccaggctggagggacgtggtgggatcttggctcactgcaacctctgcctactggattcaagtgagtctcctgcctcagcctcccgagtagctgggactacaggcatgtgcccagctattttttgtatttttagtagagacagggtttcaccatgttggccaggatggtctcaatctcttgaccttgtgatctgcccgccttggcctcccaaagtgctggcattacaggcatgagccactgcacccagccatatcactacttaagctttgtgtccttttcatatgtaaagacaaaaagttagcataaaaacgtaaacaagaactttatatagccagaaaaggtacagtgtaatgctgatgtttttgctttaagtaataaaataaaacttttttttattatagaaatggtaataaaatattatggagaacagtttgaaaagagagaataatttttaaaaggagataagaattgatcagtctagatcaacctagaggtaaccattgttaatgttttcttcttattgtagtaaaatatatataacattaaaattgacagttttaataatttttaagtgtacagtgtcatgacattacgtacactcacattattgtgcaaccattaccaccatctatcttcagaactttttcttttttttaaactgaaacttcatatccattaaacactaagccctgattttgccccctcctcagccctggcaactgccattctactttctctatgaatttgattactctaggagccttgtaagtgaaattatttgtccttttgtgactggcttatttcactgagcataatgttcatttatgatgtagcatgcatcagaatttccttcctttttaaggctgaatgaaaactcactgtatgtatatgccacattttgtttatcccttcatccattgatgaacacttgggttgttttcacctttgggctactgtgaataatgctgctatgaacattgatgtacccatgtgagttcgagtccttgctttcagttcttttgaggatagctccagaagtggacttgctgggacatatcgtaattctatatttaacattttgaggaacttccatactgtcttccacaggggctgcaccattttacattcctactagcaatgcacggggtttcagtttttccacattcttgctaactttctattttttttaagtagccacgttaatatgtttttgatttgcatttccctagtgatttgtgatgttgagcaccttttcatgtgcttattggtcatttgtgtatcttctttggagaaatgtctattcaagtcctttgctggtattttatttgggtcttgctgctgttgagctttagtagttctttataaattctgaatattaaaccataatcagatatgtgatttgaagatactttctcccattctacaggatgtcttttcactttcttgatatgtctttggatgctcaaaattacttaattttgatgaagttcagtttctctattttttctttttttgcctgtgctttcagtgtcatatcaaagaaattgttgccatatccaatgtcataaagcttttcccctttgttttttcctaagagttttataattttagctttcgtttctaggtttttgatccattttgagttaatttttatgtatggtgtaggacaagggtccagcttcattcttttgcatgtggatattcagttttcccaacccatttgttgaatattgttctttcccgttgaatggccctggcacccttcaaaaattgttgtattgtatctgtgaagttgcatttctggcatctctattctattcagttggtgtatatgtctgtctttatgccagtatcacactgtcttgattattgcagctttattctagcaagttttgaaatcaggaatcgtgagtcctccagctttgttttttttttccccctaaaattgttttggctatttagggtcctttgatatttcatatgaatttttgaatggatttttctattttgcaaaaaccattgttggaattttgataggaattacattgaatctgtagatcacttcaggtagtactgatatcttaaaaatattattttctaatccatgaacatggaatgtctttttattaattggtgttttctttaattctttcatcaacatttatagtttttagtgcacaagtcttttccttccttggttaagcttattcctaaatattttattatttctgacactattataaaaggaattatttttaaatttccttttaggatttttcattgttagtgtatgataatgcagctgatacttgcatgctgattttgcttgtggcagccttgtttatgttttatgttcattaattctaacactttttttaaaaaagggaatctttagggctttctacatataagatcatgacatctgtgaacagagataactttactttgttctttctgatttggatgtcttttatttctttttcttgcctgattgctatggctaggacgtgtactgtgttgaatagaaatggcaaaagtggactttcttgtcttattccttatcttagagaaaatgtttttagtctttcacttttgagtttaatgttagttgtggatttttcatacatggccttcataatgttgaggtaattttcttttagtcctagtttattgagtgttttttaaaaaatcatgaatggtgttgaattttgtcaaatgattttctgcatcaattgagatgatcatatggtgtttgttcttcattctgttaatgtaatatattacgttcattgattttcacatgttgaactccttgcattccaagaataaatttcccttgatcgtattgtataatccttttaatatgcttctgagtttggtttgctagtatttagttggggatttttatattaatattcataagaaatattggtttgtagttttcttttcttataatgtcttggtatagtttcggtatcagggtaacgctggtctcatacaataagttagaaaacgttccttcctcttcagtttttcagaagagtttgagaagaattatgttaatccttcttaaatgtttggaagaagtcaccagtggagacatctagtccttggtttttctttcataggaggctttgattactgattcagtccctttactagttaaggtttatttggatgttctgtttcttcatgattcagtctgtggttcctgggccttcctgtctttttttttttttttttttttttttgagatggacttttccttcatggtttattcctaaatattttattatttctgacactattataaaaggaattatataatattcttttttgtcccttataatagttttttaacttaatgtccattttgcctgatattagtatagccaccactgctctcttttcattactatttgcatggaatattacaaatagtattttccatactttcactttcaacctgtatgtgtccttagatccaaagttagtctcttttagacaaaatatagttggattctttttttttaattttttattccattctaccaacctacagcttttgattagggagtttaatctgtttatatttaatataattacggacagggaaggatttattgtggtcatcaagttagttgtttctgtttttcttatagcttttttgtttcccatatcatccattactttctcagtgttaagtggatttttctgtaatgacatgttttgattcccttctcatgtacttttgtgtatagtctgtagatttttttttgtggttaccttgagcattacacataatttcctaaatctattgtttcctaaaacaatagacttttttattatactttaaattttagggtacatgtgcacaacgtgcaggttagttacatatgtatacatgtgccatgttggtgtgctgcactcattaactcgttatttaacattaatatatctcctaatgctatccctcccccctccccccaccccacaacaggccccagtgtgtgatgttccccttcctgtgtccatgtgttctcattgttcagttcccacctatgagtgagaacatgtggtgtttggttttttggccttgcaatagtttgctgagaatgatggtttccagcttcatccatgtccctacaaaggacatgaattcatcattttttatggctgcatagtattccatggtgtatatgtgccacattttcttaatccagtctattgttgttggacatttgggttggttctaagtctttgctattgtgaatagtgccacaataaacatacgtgtgcgtgtgtctttatagcagcatgatttataatcctttgggtatatacccagtaatgggattgctgggtcaaatggtatttctagttctagatccctgaggaatcgccacactgacttccacaatggttgaactagtttacaatcccaccaacagtgtaaaagtgttcctgtttctctacatcctctccagcacctgttgtttcctgactttttaatgatcatcattctaactggtgtgagatggtatctcattgtggttttgatttgcatttctctgatggccagtgatgatgagcattttttctgtgccttttggctgcataaatgtcttcttttgagaagtgtctgttcatatccttcacccactttttgatggggttatttgtttttttcttgtaaatttgcttgagttcattgtagattctggatattagacctttgtcagatgagtagattgcaaaaatattctcccattctgtaggttgcctgttcactctgatggtggtttcttttgctgtgcagaagctctttagtttaattagatcccatttgtcaattttggcttttgatgccattgcttttggtgttttaaacatgaagtccttgcccatgcctacgtcctgaatggtattgcctaggtcttcttctagggtttttatggttttaggtctaacatttaagtgtttattccatcttgaattaatttttgtataaggtgtaaggaagagatccagtttcagctttctacatatggctagccagttttcccagcaccatttattaaatagggaatcctttccccatttcttgtttttgtcagctttgtcagagatcagatagttgtagatgcgtggcattatttctgagggctctgttctgttccattggtctatatctttgttttggtaccagtaccatgctgttttggttactgtagctttgtagtatagtttgaagtcaggtagcatgatgcctccagctttgttcttttggcttaggattgtcttggcaatgtgggctcttttttagttccatgtgaactttaaagtagttttttccaatctgtgaagaaagtcattggtagcttgatggggatggcattgaatctctaaattaccttgggcagtatggccattttcacgatattgattcttcttacccatgagcatggaatgttcttccatttgtttgtatcctcttttatttcattgagcagtgtttgtagttctccttgaagaggtccttcacatcccttttaagttggattcctaggtattttattctctttgaagcaattgtaaatgggagttcactcatgatttggctctctgtttgtctgctgttggtgtatcagaatgcttgtgatttttgcacattgattttgtatcctgagactttgctgcagttgcttatcagcttaaggagattttgttctgagacaatggggttttctagatatacagtcatgtcatctgcaaacagggacaatttgacttcctctattcctaattgaataccctttatttctttctcctgcctgattgccctggccagaacttccaacactatgttgaataggagtggtgagagagggtatccctctcttgtgccagttttcgaagggaatgcttccagtgtttgaccattcagtatgatattggctgtgggtttgtcatagatagctcttattattttgagatacatcccatgaatacctaatttattgagagtttttagcatgaagcattgttggattttgtcaaaggccttttctgcatctattgagataatcatgtggtttttgtcattggttctgtttatatgctggattacgtttattgatttgtgtatgttgaaccagccttgcatcccagggatgaagcccacttgatcatggtggataaactttttgatgtgctgctggattcggtttgccagttttttattgaggatttttgcattgatgttcatcagggatattggtctaaaattctctttttttgttgtgtctgtgccaggctttggtatcaggatgatgctggcctcataaaatgagttagggaggattccctctttttttattgattggaatagtttcagaaggaatggtgccagctcctccttgtacctctggtagaattcggctgtgaatccatctggtcctggactttttttggttggtaagctattattgcctcaatttcagagcctgttattggtctattcagagattcaacttcttcctggtttagtcttgggagggtgtatgtgtccaggaatgtatccatttcttctagattttctagtttatttgcatagaggtgtttatagtattctctgatggtagtttgtatttctgggggttcaatggtgatatccccttcatcattttttattgccatctatttgattcttctctcttttcttctttattagtcttgctagcggtctatcaatgttgttgatcttttcaaaaaaccagctcctggattcattgattttttgaagggttttttgtgtctctatttccttcagttctgccctgatcttagttatttcttgccttatgctagcttttgaatgtgtttgctcttgcttctctagttctttcagttgtgatgtttgggtgtcaattttagatcttcctgctttctcttgtgggcatttagtgctataagtttccctctacacactgctttgaatgtgtcccagagattcttgtatgttgtgtctttgttctcgttggtttcaaagaacatctttatttctgccttcattttgttatgtacccagtacattcaggagcaggttgttcagtttccatgtagttgagtggttttgagtgagtttcttaatcctgagttctagtttgattgcactgtggtctgagagacagtttgttaaaatttctgttcttttacatttgctgaggagtgctttatttccaactatgtggtcaattttggaataggtgtggtgtggtgctgaaaagaatgtatattctgttgatttggggtggagagttctgtagatgtctattaggtctgcttggtacagagctgagttcaattcctggacatccttgttgactttctgtctcattgatctgtctaatgttgacagtggggtgttaaagtctcccattattattgtgtgggagtctaagtctctttgtaggtctctaaggacttgctttatgaatctgggtgctcctgtattgggtgcatatatatttaggatagttagctcttcttgttgaattgatccctttaccattatgtaatggccttctttgtctctcttgatctttgttggtttaaagtctgtcttatcagagactaggattgcaactcctgtctgttttccatttgcttggtagatcttcctccatccctttattttgagcctatgtgtgtctctacacgtgagatgggttccctgaatacagcacactgatgggtcttgactttttatccaatttgccagtctgtgttttttaactggagcatttagttcatttacatttaaggttaatattgttatgtgtgaatttgatcctgttattatgatgttagctggttattttgctcattagttgatgcagtttcttcctagcctcgatggtctttataatttggcatgtttttgcagtggctggtactggttgttcctttccatgtttagtgctttcttcaggagctcttgtagggcaggcctggtggtgacaaaatctctcagcatttgcttgtctgtaaagtattttatttctctttcacttatgaagcttagtttggctggatatgaaattctgggttgaaaattcttttctttaagaatgttgaatattggctcccactctcttctggcttgtagagtttctgccgagagatcagctgttagtctgatgggcttccctttgtgggtaacccaacctttctctctgactgcccttaaaattttttccttcatttcaactttggtgaatctgacagttatgtgtcttggagttgctcttctcgaggagtatctttgtggcgttctctgtatttcctgaatttgaatgttggcctgccttgctagattggggaagttcttctggataatatcctgcagggtgttttccaatttggttccattctccccgtcactttcaggtacaccaatcagacgtagatttggtcttttcacatagtcccatatttcttggaggctttgttcatttctttttattcttttttctctacacttctcttcttgcttcatttcattcatttgatcttccgtcactgataccctttcttccagttgatcgaatcagctactgaggcttgcgcattcgtcacatagttctcgtgccatggttttcagcttcatcaggtcctttaaggacttctctgcattggttattctagttagccattcgtctaatcttttttcaaggtttttaacttctttgccacgggttcgaaattcctccattagctcagagtagtttgatcgtctgaagccttcttttctcaactcgtcaaagtcattctctgtccagctttgttgcgatgctggtgaggagctgcgttcctttgaaggaggagaggtgctctgatttttagaattttcagtttttctgctctgttttttccccatctttgtggttttacctacctttggtctttgatgatggtgacatacaaatggggttttggtgtggatgtcctttctgtttgttagttttccttctaatagtcaggaccctcagctgcaggtcttttggagtttgctggaggtccactccagactctgtttgtctgggtatcagcagtggaggctgcagaacagtgaatattggtgaacagcaaatgttgctgcccgatcattcctctggaagttttgtctcagaggagtacctggctgtgtgaggtgtcagtctgcccctactgtggggtgcctcccagttaggctacttggcggtcagggatccacttgaggaggcagtctgtccattctcagatctcaagcggcgtgctgggagaaccactactgtcttccaagctgtcagacagggacatttaagtctgtagaggtttctgctgccttttgttgggctatgccctgcccccagaggtggagtctatagaggcaggcaggcctccttgagctgcggtaggctccacccagtttgagcttcccagccgctttgtttacctactcaagcctcagcaatggcgggcgcccctcccctagcctcgctgccaccttgcagttttatctcagactgctgtgctagcaataaacgaggctccatgggtgtaggaccctccgagccaggcacgggatataatctcctggtgtgatgtttgctaagaccattggaaaagcgcagcattagggtgggagagtgacccgattttccaggtgccatctgtcacccctttccttgactaggaaagggaattccctgaccccttgcacttcccaggtgaggcgatgcctcgccctgctttggctcacgctcggtgcgctgcccccactgtcctgcacccactgtccgacaatccccagtgagatgaacccggtaccacagtttgaaatgcagaaatcgtttgtcttctgcgttgctcacgctgggagctgtagactggagctgttcctatttggctatcttggctccccaacaatagattttaaattaatatcaatttaatatcaatgtcatacaaaaactactcttttacagctccatctcctactatgtattattgttgtcatagattatgtctttgtatattgtgtgtccattaatatgcacttatgattcttttatgcatttgtcttttaagtcctttagaagaataaaaagtggagttacagaccaaaattacaataaccctggtttttatatttgtccatgtatttacctttaccagaggactttgtatttccacgaggctccaagttactgtctagtgtcctttcatttcataccctttagcatttcttgtagggtaggtttagtggtaatgaactctcagcttttgttgatctgagaatatcttaatttgtccctcatttttatttttttaaatttactttaagttctgggatacaagtgcagaatgtgtaggtttgttacataggtatacatgtgccatagcggtttgctgcacctatcaacctgtcgtctaggttttaagccccgcatgcattagctatttgttctaatgctctccttcgtctcaccccccaccccccaactggccccagtgtgtgttgatcctctccctgtgtccgtgtgttctcactattcaactcccacttacgagtgagaacatgtggtgtttggttttctgttcctgtgttagtttgctgtggatgatggcttcaagcttcatccatatccctgcaaaggacacgatctcattcctttttatggctgcatagtattccatggtgtatatgtaccacattttctgtatccagtctatcattgatgggcatttgggttggttccatgtctttgctattgtaaatagtgctgcaataaatatacaacatgtgtctttatagtaggatgatttatatttctttgggtatatacctagtaatgggactgctgggtcaaatggtatttctggttctagatccttgaggaatcgccacactgtcttccacaatggtccaactaatttacatttctaccatcagtgcaaaagcattcctatttctccacagctcaccagtatcttattgttatttgactttttaataattcccattctgacttgtgtgagatggtatctcattatggttttgatttgcatttctctaatgaccagtgatgatgagctttgtttcattgtttgttggccacataaatgtcttcttttgagaagtgtctgttcatatcctttgcccactttttgatgggggtatttgtgtttttcttgtacatttcttgtacatttgtttaagttccttgtagattctggatattagatgggtagattgcagaaattttctcctattctgtaggttgcctgttcactctgatgatagtttcttttgctgtgcagaagctctttagtttaattagatctcatttgtcaatttttgcttttggtgcaattgcttttggcatttttgtcatgaaatctttgcccatgcctgtgtcctgaatggtattgcctaggttttcttctagggttttaatggcttgaggttttacatttaagtttttaatccatcttgagttaatttttgtataaggtgtaaggaagggtccagtttcagttttctgaatatagctagccagttttcccagctccatttattaaatagggaatcctttccccattgcttgtttttgtacagtttgttgaagagcagatagtcgtagatgtgtggtgttatttctgaggtctctattctgttccattggtctgtatgcctatctcagtaccagtaccatgctgttttggttactgtagccttgtagtatagtttgaaatcaggtagcatgatgcctccagctttgttctttttgcttaggattgtcttggctatataggatcttttttggttccatatgaaatttaaagtagttttttctaattctgtgaagaatgtcaaaggtagtttgatgggaataatattgaatatataaattactttgggcagtgtggccattttcatgatattgattctttctatctatgaggatggaatgtttttccatttgtttgtgtcctcttatttccttgagcagtggtttgtagttctctttgaagaagtccttcacatcccttgttagctgtattcctaggcattttattctctttgtagcaattgtgaatgggagttcatttgtgatttgtctgtctgcttgtctgttgttggtgtataggaatgtttgtgatttttgcacattgattttgtatcctgagactttgctgcagttgcttatcagcttaagaagtttttggactgagatgatgaggttttctaaatatagaatcatgttgtcttcggttgaatccctgaatagaccaataacaagttctgaaattgaggaattaatagcctaccaaccgaaaaaagcccaggaccagacagattcacagccaaattctaccagagatacagagagtatctggtaccattccttctgaaactattcctaacaattgaaaagaagggactcctccttaactcattttatgaggccagcatcatcctgataccaaaacttggcagagacacaacaaaaaaagaaaacttcaggtcaatatccctgatgaacatcaatgcaaacattttcaataagatactggcaaaccgaatccagcagcacatcaaaaagcttatccaccatgatcaagttggcttcatccctaggatgcaagggtggttcaacatatgcaaatcagtaaacataatccatcacataaacagaaccaatgacaaaaaccacatgatcatctcaatagatgcagaaaaggcctttgataaaattcaacatccctttgtgttaaaaactctcaataaactatgtcttgatgtaacatatctcaaaataataagaactatttatgacagacccacagccaaaatcatactgaatgggcaaaagctggaagcattccctttgaaaaccagcacaagacaaggataccctttctcaccacttctattcaacatagtgttggaagttgtggccagggcaatcaggcaagagaaagaaataaagagtattcaaataggaatagaggacgtcaaattgtctcatttttagttcaagttttggaacatacagaattcttggctgacaggttgtttttgtttgttttatttttccctttcagcagtttaaataaatcctcacattgcctttgggctgctgggtttctgctgaacaatgtgctgattatcttactggatatcttttgtatatgatggttcacttctctcagtacttaaaagattcggtcttttgacagtttgaatatgtcttggtgtgggtctctttagttttatcctactttgagttgttaaatttctcggatttgtcaatttatgtattttctcaaagttgagacattttctgctattattccttcaaataatatcttcctctttctctcttctccttctggaattctcgtaacatgtatacttgttcccttgcttgtgccccataagcctcttaggctctgttcacttttcttcattcttttttctttctacctctcagattcagtagttttaaatgacttgtctttagattttcttattctttcttttacctgtttgagtttgctgttgagctcctgtaatatatttttgaaaatatagtagcatttttcattcagttgtgtttttcagctctagaatttctgtttggttccattttataatttctgtctctttgctattattctcattttgtttttaaatcattttcctgattttctttagtacttagtccatttttcctctagctctttaagcatatttaagacttatgtggtaaaatctttgtctagtatatccagtgcctatgtttcttcagggatagtttccactgctttattttcttcatttttgtaagccatgttttcctgttttgtcttttgtatgtcgtgtgcttttttaaaatggaaaattaggcatttgaaaaaaaaataaccacttcctcctgtctttctagagtggctttgtgttggggaggacctttgggatcagctgagctttattaacaagctgagctttgggatagctcactgtgaaggcttaaggccttgctaggcccttttctgggtatgtgtcttatgtgggcctgtgtgtatgcttttcaattcccaagtatagatggtggcttttaattttcttaatttccccaatactctcaccttggctgctggaccttatgtattctattgtattcctctgcctgcagtctgttgccctaggtgtctgtgggtctgttttcttagagtagctgtcactgctgcttcctgtttcttgtgccttttcctagcctgagaggcaagctgtggtggtttttgccttctgagcttggagttaggcaatgcagagaccagtcctcaggcagtcctcagacaggttaaaatattgcaaattaggtcaggtctactcccttcagagggagggaattggaagctttggccactgcctcctccagcccaaggctacaccaggctgggaagtaggggaaaaaagagtgaataaaaatgaaatgaaatggcagacattttgaatgtggcttcttcagtaggcatttgcttaatgactatagaactttgttttccagctcttttataaagttaatgtagctagtctctagttgtttttctttaatgtttctttgggtgaatgagggcctggagcctcctggtctgctattttgctgatgtcactgctccagataatattctttttttttcctagttaatacaacagtgatttaactcacaggattaaaaatgtttagagttttagatgggcatggtggtgcacacctgtagtcccagctgcttgggaagttgagttgggatgatcagttaagcccaagagttcgaggctgtagtgtgccatgtttgcacctgtgagtagccattgccctccagccttggcaatatagcaagacccagtctctaaaaaaagaaataagaaaagcttagcatttaattttttcaagtactttggagaatgcaataagaattgtcaattttatgctaaaatttatcatatggaagttcttacggtgttgatttggttgcagcacaactttttatttatgaaaaaggaatttactctttgaaatggtaagattttgggaccaacagcatgaaatggatataatggaaaatgttcttttattgctgttgggtgcattctcttgcacattctgtaattttgacataggctactgtgattagaaattacatcatttgtgtgatggaaaaatatagagaactagaggcagtctgaactaaattactgctccatgaaaccaaaggggcctgagatgacttagacaccatccttcttgaggatggggaatgaatcagtgatcagctgagccttctggtggtgtgattcagacattatttagctggggttctgaacccaggatccattaatggagttaaactttcttttaaaatatattccaaaatcattttacagagatttattctcattctcctcaatgtgcagtttggtcggcactgagggcaagggcttgtgctgttagatgaagatagatgtgctgtgaccattcattgagtcctctggcagcttagggtggaccttgtgccccagggctgtctccagtgtcaccaacactcatcttcaaggaggttctgctctggaacctgttgtcaacacagaggttccaatttgatttaattggatgcctgaagggaaatgaatggagagaggtgcttgtttccaccccatttctatgcctgtttgacatgttggtcataaacaggatcgatgggcagattcaagttgttggactattacactgtggcaaagatgcctggtacagcattgcagagggcctctcagatgaggcgcgtgctcctgcactttagtctatgttgttttgtttttgtgatgtttaatcagatcttactaattttttaaatccaagcttggagtgaaactttggcaccctgacagtgcttataacttaggaaacttgaggaattgatgtatgtggggaagtaggaagaggccagttttagctttccatctggataacttggtcaattcctgctatgctgttgaactaccaagaggattaggaccctttgctctttgtcccttctaaggagtttctatcataagccagtggtagaatttgtcatatgagggagtcagtggctcattcacataaagtaatgaaatatttgggtacatgctgatagcatttagtgtttccagaagggcaaatgcctagttattatgacttactaagacctatgctgtctgtcaataattcttttctgttatgctgaaatcgctttggtcactacaaaagtgacttttcatttccaagagtctggtttttttttgaaaggcagtctcactctgttgcccaggctgaagtgcagtggtgcaattacagctcactgcagcctcaagctcctgggctcaagggatcctcccaccttagcctccagagtagctgggaccacatgcatgtgccaccatgcctggctaattaaaaaaaaattatagagacagagtcttgctttgttgtccaggctggtcttgaactcctggcctcaagtgatcctcccaccctggcctcccaaagttctaggattaaggcatgagcctctatgcttggcctccaagagtcttaagttggattttctagaagcagagcctgagatcgcaatccagttgcagtgagttattgaggccatataggagcaggggattgaggagtgtgggattgggcagtggagggaggagcgtaagcaagtgagcgggctcagccagggtcgtgcttcagcacaatcccatgagaccttcagagcatgaattgctctattgatttggtcccactttgagaaatacccagtattaggcactgttggctcctggctgcctgagagtgctgggatctggggcaggccactgggcatgacctctgtagggaggaggctcccatccatccaatgggaatctccttggaagggtggctgtgagcctttggcagcaggcgcccgcagctcttgggacaggtgcactgccaccacaccaagtgtgcaaaggacccgggtaaatgcattgcttaaagctagtgtagcttatttgagaaaaacaactcttactacttatttttagtatctattttattgcatcataagtcagatttagaagatgtagcactgtagaaagatgaaaaagtaggacagaacttttatttgaaatttaaaagattttcccatctaattaaaagttttacctttttattgtagaataaaatacaggtacagaaaagataagaagcaaatacatagtttagtgaattattttagacagtttcccctggaaccaccactcaagtcaggaggtagaaatttgccgccccaggaatcacctctgtgtgctgcccctttcccgtcacaccatcttcctccctccaggagcaccccctgtcttgaaatttataataatgactttctaacatttctttatggctttatcatccaaatttgagctatagtttaatcttctctaattagaacacttgaaatgtcttttaggtcaggcgcattggctcacgcctgtaatcccagcactttggaaggccgaggtggagggatcacgtgaggtcaggaggtcaagaccagcctggccaacatcgtgaaatcttgtctctactaaaaatacaaaaattagccgggtgtggtggtgcgcacctgtaatcccagctacttgggaggctgaggcaggagaatggcgtgaacccaggaggtggaggttgcagtgagctgaggttgtgccactgcactccagcctggttgacagagcgagactgcatctcaaaacaaaaaacaaacaaaaaaacaaaaacaacaacaacaaacacttgttacatcttttaagtttccattttaacaggcaggctctctacttccttattttccttgaagtttaattaattaattaattagagatgaggtcttgctctgttgtgcaggctggactcctgggcttaagtgatccttctgccttattctcctagagtgttggtattacaggcatgagcccccacacccagtttgcttgaaatttatttgttgtaatggatggttggatgcaggaaaaaaaaaaaaggaagtttatttgttaaagacactggacctgttggctctagaggttccttcaccctggattttgctgactgcagacttgtggtataattcaacatgtttgtttatcctctgtatttcctatatcttggtagctgtattaggaagcttgatcagaatttggtcttctttggcaagtgtagaagaagtggtatattttttcatcaggagatatgtgtgcctgtccatatttcttttaatattgtcttcctagttgcattagttcattggggggttagaagatgggcatcctgcagttctgttattttgtttttacttattggctggaacatttttgtaaggacatgcttcccttcatctaccatttggttacccatggtatatggctcatataaatggttgatgttccttttagttaccaagtttcccagtcatccttgagagatgactgcttttttacatataattatgaactcatggattttaacatagttgatgtttcgatccatcacaattattattattactgaagttcaaactatcctatccctgaccagtgaaacccttttctggttgtttcctgagtccttttgacgtggccctagtcttctttgatggcttctttgctattgggtatgacaagatcatacccaatccacactcatcttgtatattttttgcaccagacctggaatcagccatttgtttcaagaagctctagttttttataatgataagttgcatttcaagagcatggtctgtatactagggatattcactgacacgaggttattgtttttaggactttttagtggacagagccagggatgtatgtgtgtgtgtatttatatctatgcatctatttatctatctatctgtttatcgatatagatatctagattatatatatctagattattttatatatagagagagattatatgttttcacaagataaaagattttgtgaatgcctgttgatatatccagttcaaacagaagattattgagtttttctatattacatttatctccttccatctacactgagaatgctaattttcaaggacatgggggatgatggttagaatattttattattactcatttgatttatccctaaaatgtgataaataaaatttatcctatttatccctcaaatgtgataaatcaaatttatcccatttatccctcaaatgggataaatcaaatgtacagagttagacgaaaactactaattctaccgtcaccaattgtgatgactggaaacagtttgttgcagaggaaaagcaattctaaccctgctctttttgaagtttttctgtaattgatacttagaaagttggcttaccatatttccagctggaaataattcatccatattattaaaaatcataattcagaaagatactgggtggctagaaaaatcagttaacacaaatatgatgaaatttaacaaaggtgaaaattttcattctgaaactccattatgtaattttaggatgggaaagtgaaaagaactatggatggagaaaagaatagtagtaaaccaaaacacaacaaaacccaagactgtgatgtacaccagtaatatcaggcggctgaaaaccaacagaatcccacccctggcttttcaggctgtgttcctaggagcttggtgttttcatcagtgcacgtggttactccatggaatcccaaaattgtcattccaacctgtgctcagcctcaggctttgtgcacaaggacaggcattgacacactataggtggctctgaggcagggactccagggagccaagaatctggacattgtgtcacaggagaagcagctgaggagttgagggatggagaggactccatggttgtaagagaccttcaagtaaatggagtagcctttctgtggaggaagggagtggggtcttagcatagcttgaaatgatcagtctggggcctgtgggtgcaaggtacagggaagtgaaacctcaagccgtggtcagaaggtggtttctaacagcaggacttgcccaacaatggaatgggctgcttgtcacatgatgtacttccgtgcctttaccattgtttaagacaacttggaaaaaaaaaagccatgttcttacctgctaactccaatactctgctgttccatttgctatgtaatattagtaaggaagggatttaattttttaattgcagataagacatgattgtgagctcattttagggaacttaatttcctgggagttgtctctcatggatgcctaattaggaggcactgccagttggatttggtcttatcatcacagagatgatgaatgatttgaacgttggtggtgatcagaaagattgcccctaagaatccagctttctggtgacatctagattgagcacttcttgatacaggccaaccgcagcattgcagagggttctgatgcctccaacctgctttgccctcagatgacgctgttcttggcttatgtgtttcaaagattcccttccagccaacaggcatggctaaggcacaattggacattgattagctttgtttctagcaatctttggcttttgaaatcaatgtgactgaggtgttttcaacttcagatggagcacagagactgtgagctgtaggtgggccacagaatggaaagatgagaaacttcaagctgtggcaaaccttggagaacagtgagtctcctgagcgaggggcaggcttggccacatggaatctccaccaagctggccttgcttgggacccaggcttctgaccttcctgcaggtcatttcctctcatcattggagggaaaaaacatcacatctcggagccactttggaaacaggtttattttagtttcagaccaataataaaatatcctgtagagattcccttctcagaaaagtgctgtttgccctcagggaggttgtagtcaaactgggagtgcagtgagatgaatccaagtgaggagatgtgtggtattacagcgcagccagcgaggataaagcagcgctcacctgccatgatcctggctagttttcactctcagtgctgttgtgcattttgcctggtggcagatatcaacactaaaaaaagtatgacaaaagattcctggatttttaggtcaatggaatttccaggtcatcaataataaccatggatagtcttgaaaagagcataagtagacatgatctggattttccaatttctgccttcaaacgtactggccatttacatttatttgaaaagataagttgatgtaagagaaaatctctggtatcatttttcaaaaggcaggcaaggccactgagatgcagggcaattggccaccctcttaaacaaggcttctccctggtgtggaaactgagtgaaggagaggcatggtatgtaccactttgacgctatgcaagtaagaggtgacatgaagatgaaaattcctggaccctgggagaatttctggtatttttctgtcccttttctccccactgatttcttttttctccagaggaggaggcagatgagtgggaactgagtataaaaactccaccacactttgcattcagaattcagaatagtctttaaggtttgcaccaaatatttgggtattgcatgtgcattgtgatgtcagcttgttgtgggagggaatggggtcagtagcacacgtgacatctgtgcagagcccatcactcatcaggaagaccgtcagcaggggtcccctcccgttttgactcaaaatacacttctacaagctccgcctcctgggttcacgccattctcccacctcagcctcccgagtagctgggactacaggcgcccacactcggctaattttttgtttttgtatttttagtggagatggggtttcaccttgttagccaggatggtctcaatctcctgacctcgtgatccacccaccttgtttcctgtcattttaacatacataatataccaacatttctggtggtgatttttagtaagggatgttggattggaagaagggtatatatctttccttatactataagcattctgagtacttcttgttgcacctcgctttgtttggtggttccaggccctcagtacagttctccagaagggatagccaatttcaccatggccttaagccagatttctgttgtcccatctgctggaagatgaggatgttctcttcctgggcctcttcatgctagttctttcattggcaggagtgcgtgttgtcttgtaggggttctggatgacatcactgctgcccacacccatgcaggtgttagggctggaggtgaggccgtgctgacagctgagaagggacagttgcaacagtttgtaggatgagaaataatgagttgcatgttttccatgaggggcctctccatcctagcatgatgtcagctgcattcttggtagggtctgcccccagccagccagagcaggctcatggtagagcgacgcatgactgcttggatctgtttgcaatggggtttgacacagaaggcaagtcttgactgcatgaaggtttaataggagcgtacttgacataggaggcgagttttgactgtatgaaggtttaataggagcgtacttgacataggaggcgaattttgagtgtatgaaggtttgataggagcgtacacttgtgattgtcacccatcgaggtctgtgggcaaaggcacacatttggaaggtaacacaagcagaggcgtgagcgagaggagagaggccgtcttttagatttgtcattgtgcctttgtctcatacactgactgttctgttgaagctggttgtgggttgtacgagtttgtgtaggaccgttggatggctattctagtctgatagtctgtcagtgtggactgaaacctctctcagtttatcagcatgggagtgaaattcgtgctttcctatgattgtgccagctgactgttccagtgaccttatcattcagtcttttgcagtccaaatagaccttgtaaatggagttttggaatatgtctctacacgccatagatggagggaactcacagaggagaccaaggtatgatgtgcagcagccatttaggagtcagagcccactaggggcagtcggattccaaaacctccgtgccagcagggcagccatgcggccttcagattgcagtctccatgctttagctatgcatctagacatttctagctggaccttaatagaaatatgaacacatcttagaaggcaaattgaataaaacaagtggaaaatttaaaaggtaaatgtagcagaaaacagtgtgatagattaatggtatggaaaccaatttaatagaaatgagaaggggaagacaaagatgataaacgttaagttattcttgagtaagagttagtctttgggttgtgggcaggaaggatccttctgactctatgaaaattacccaagagggaagtggattgctggatatgagcttgttgggtacttttatgcctatagagaagagctaaattagaaaacttttttttttttctttgcttgagatatgagagcccaactcacctttggggaaaaatggaacatatttctaaccagttctgtgctctgtcgttagttatcaggttagtcataaaaatgccaaccggcagcaaaggctggagaacactaagaatggagaagggggaccaggcgtggtggctcacgcctgtaatcccagcactttgggaagcagaggcgggcggatcacgaggtcagcagattgagaccatcctggctaccacggtgaaaccccgtgtctgctaaaaatacaaaaaaaattagccaggcgtggtggtgggtgcctgtagtcccagctacgtgggaggctgaggcaggagaatggcgtgaacctgggaagtggagcttgcagtgagccgagatcgcgccactgcactccaacctgggcgacagagcaagactccgtctcaaaaaaaaaaaaaaaaaaaaaaaagaatggagaaggaggtggttaggtgggcaggcttcatgttgtttcccttaacgaaggtcttcaggctgcgccggggaaagggagagtggaaattcaaacagatttctcaagtgtgcaagggtgtgttttaattattccagtgccaaaaagagctttgtctaaacaaagccaaacctgttatgcatcgtgtcagaggagcctaggagtcagctttgaggacagttttgcatttttaactatcacattgtctttggattggtgttggcttatgaccttggctttcagggactgttttgacagctgacaatgatgatgctagttctcatttccatgataaaatatgtagtgtcaggaggagtaatgtaataaaaataaaaataaaataaatattggttgtggtctcacagatagcttgagtctttataattataatcagtctcatttttaaagatgtgaaacattttaattggcaaattaacagcactagagtactcttttggtggaactgtaatgcagcaccacgcttggctttttcagtgcttgtcaggttcaaaagtctctaaataatgccatgtactatgcttgtttcttgtggcatctctgctagacctgatcttgtgagcaggctttaaagtagtaaacataaattttaaaagtttggtctgaagtatactgaggccatagaaatgttctgttctaaagaataaatataattagcataaaacaagttttaatatatattaagtgaaaatatcatatcatagtatctgtaacatgataccgtttttggcaaaagatatatatgcagaatcatctgctctgaaggagacatgccaagctactaacattggttaactttggtcatggggttacgagtattaatgttttaatttacttatctgtattttccatttttttcccacagtgaacatcattgccattattgctttttaagaaaaatgttctataatgacatgtattatttgatttttttttaaaagagacaaggtcttgctctgtcacccaggctgaagtgcggtggtgtggtcatagctcactgcatcctcaaactcctgggctcaagcgatcctcctgcctcagcctcccgagtagctgggactaacagcatgtgccaccacacctggcttatttcttaaaaatttttttgtgaagacaggatctcactgtgttgtctaggctggtcttgaactcctgtcctcaagtgatcctcccacttcagcctcttaaatagctgggattacaggtgcgagctgccacacccagctctattatttgatttttttgtgtatggaggggccatgtcatgcaagtagcaaataaatttgaaaatcctcagtggacgcactttgttctgtatttcctgcatacctgaggctggcgatgctgtgagtggtattatactcatgtgtgcagaagtctttcagtagttcctcatggaggaaaggaagcagccagcctaagcaggcaggaaaggttcagctcagcgctcagtgcagttccactcgtgtgtttgaagtgtgcaaagtgtgatgggggcaaagagcacaggatagtgtccttgtctgtaagcaacttacaggctagttagggagacaagacacaccatgaaagcagctagtgagcgatgcaggtgctgctgagttgtgcagtacaagtaactaaagcagctgctcaggccgtgatgcagacagtgggagtgatggagggagacagggaaaggtgaacgtagctaggagtcatcagaaatgcgtttgcattgctttgtttattctttcccctggagagaaggagcagatgcctgtccttggaaggagctcctgtatggctacaccgtccgtgcttccagcattaatcttttgctttttaccttgagagctggttccatgagagtctctaaaatagaaagctccgttaactaagtctgggtgctgtcttctcgcagagatgctgggaaaacttggcttccctcatgtgtattcattaatgccacctgaggatgaaccaagacagctgagtctagcacaaagtcaggctgttgtggaagtgataattgtcaatatttgtagtgcgctgtgagagtggtgaaatccgttataaagaacgttttccacctttcgtgcataagaaaaatggatagtgtcacttagaagacagcctgtgcatgtgaatcccctccatgacggtgtccttttctgccaacacacagttctcacacagcatcttgctgtgggcaaatgtcctaaggctaaattgacctgatgctgaaatgtacttcctgtaaaagcccattcgaaggatgtgatttcactcaaggcactgcctgtctcaaagtcaccaggattccctagctgagttttatgtattatttattttgaccacaaggatacactgattatttgactgattgattgatttgaaacagagtctcaccctgttgcccaggctggagtgcaatggcacgatcttggctcactgcaacctccgcctcccaggttcaagtgattctcctgcctcagcctcctgagtagctgggattacaggcgcccgtcatcacacctggctaattttttgtatctttagtagagaaggggtttcaccatgttggctaggctggtctccaactcctgacctcatgatccgcccatctcggcctcccaaagtgctgggattacagcgtgagccagcacgcccggcccttattttattttttttaaagagacagggtctcattctttcgcccaggctggagggcagtggcacaatcatacctcattgcagactcgacctcctgggctcaaatgatcctgctgccttggcctcccaaagccctgggattacaagtgtgagccaccacaccttgtccgattatttgaaatgcaaagtaaatgtctgtgtctgtaaatcctgagctcacaggaaattatgtgttgatctcacaatgaatgagtattcaggaagagaccctggttgcttctcagcaggtagagaggataatcccgggcatggtttcctcctggtattgtttccccaaagaccactaacaggatgactctcaggttcttctctctggaagaaccaggcttgccagatgctcagctaaatttaaatactggatcttttgaagatcagtatttctctgccctgaattgaccactgtgggagatatactcttggagatcagggtctggaatgtattgatttgatactgaaacttcagcagaaaaaaatccttctgaataaatatgaaggttgtttcatctttatcatctggattctgtctttggtctgatccctctcaaaacagttactgtttctgtgaagtcattcgggggtggagggtgttagctgctgcagtcacatccaatggctgggttcttcagcacccaccacgggccagtggcttctctccagcaccgcagtgatgggtgctgacggttcatgaggctgccctttcagtcttgcgtggttcttaattattaaagaacaaagacacattggcgtgtttcttgtcagtgcgttgaagcctgtcttcccatatttcttgctcgctggtcctcattctgatccttgtggtcaaaataaataaatacataaaactagggaatcctggtgacttctggacaggcagtgctttgaatgaaatcacatccaccaaatgggctttttacaggaagtacgtttcagcatcaggtcagtttactcttaggacatttgcccacagcgagatgcaaactgggtgtcacacagaacagtcctgttgctgtccacagggaagtcctgtggctgtgggaaggaggttttgcaatcccctccagccccactccgttacaaccagtggaggtggaacttggaatctttgaaataaactcctcagatgattttggttcacacagagtcagaaccgctgtggcagcgtgagggagttttgtcaggtggtgtgattggcaggtggggcagaggggcctgggagatgaggtcccgctgtgcagaacacacggggactggcaggcaggaaagggggcgagggggtctcaggcattgaactgcgtggggcactccatggggcagaaaagagcctggcaggttttggaggtgcactgtatgctcaggaaggattcagtgcacaccaggcagcttccgtccaggcggagagccagggcccgggtgctgcagcaaggcggctgtggcagtgccaagcgagtggacagagggtctgcaggccactcagtggctgagagggtgggcaagcagctgcagggccaggtagccccatctgctgtcaaggagtgtgccgagaggggacagccgggcacgggggcacacgttgtcaagggatataccgagaggagacagccgagcccggggggcatgcactgtcaaggtgtttgctgagaggggacagcggggcctgggggcacgtgctttcaggggatgtactgagagagaggggacagtggggtgtgggggtgtgctatcaaggggtgtatcgagaggggacgactgggcatgggggcgtgtgcctgtggtcacagctactcaggaggctgaggcaggagttttgcttgagcctgagaagtcgaggctgcagtgagccatgacggcaccactgcagtcctgcccaggtgacagagtgagacctgagaccctgtctcataaaataaaataaggaacagatgtgggaggaagggtctgtttttggcttcttagacctgggtatatctgggggtggtgcgagtgagcctttctaggaggcagctagcagataaaggtgtggagcccaggggatgcttcctgcaccaggcgacaggtttggtggcattggcgcacggttggcgtggaagccaagtttctagagggagccgacaagaagctgagtgtgggactttgggggatgagctaaggaggaagaaggaacaagagaggaagaacagaagagtcgggggccctgcagagaacgggggcctgggtgtctgaagagcaggcgtgggctcagcactgtgggcatgtgaggtgtgcactgccccggcctgtctcagggatgcctgctttctgtgtagggagctgcagttatgcacagccttgcctacaccagaacttcatatttaaagtgaacacatactaaaatcataggcataaagcagctttcccaccgaaagcaactctgattttatccatccattactctacctgtccatctcccctgggggtgagcctgctgtgtgtcggatgcccttccagggactcacagagtgcctcctgcacctgcgtcattgagatttctccagtcacttttatgtgggtttgggggaccaggttgtttgggagcatcttcagttttggaggatgctcatggccaaaggctcacctgaactttgtgtaggctgtttgatgactagcttaatttgcactcttcctgaattccttcttccatacactttggcactctgataggtttcaagtcccatctttgttacctggggacactggagagtggagaggcccagggccatggggaaggtggcaggagccctggccttcatggactcagcggtcctggcctcaagctattctcccgccttggtctcccaaagtgctgggattacaggtgtgagccaccgtgccaggccaagccatgatcttttttgccagagccagctcagtcattgtccgtgtgtgtcagcggtgagctggacgtcaggctatagaaggaatgtggaagctgactatgggaactggctatgggaggaccgtgtgcttttaccccaggctgaggccgggctcacaggcaggggacgtgggaactgatcatagcgaccacttactcaccttcttagggtgatctggtcatttttcagttagtaagtgtttatagagcacctgtatttggtgctggaggtgtaggaatgaaacgcattttctgccctctagttgctgtccaacctggtggagacagaaaagggaaaaatatgcgcaggtgtcaggcgctctgtaagagggcatgcgtgtggggagcctgggggcctgttggcctcagtgggctgttgggtgggcggccatggtcttggtgagaaagttgctggcaggggcactgtgggcgtctgctggtgtactcaggatggccagagcatggcacggggtctccagttggggtggagggagatgagagtggaagggaggcagtgttcggaccgtgagaagacacaggtgccccggagtgtacactgcatctgaagtgcactggggagcctttgaagagttctaagcagagaagtgatctgagcagatgtgtgttttgagagccgcccctgcactgcagcaccttggataaatgctctgattccctctgagtaaatattgagagtgaacttcatgctctttagataaatatcctttccttggtgtcttttcttctgatgccaggcgtctggtaataaactccacgtgggcttacgcacacagatacagatgcctcctcccatgccttctgtttcctctcaaatcagaggcaactggaagggtaattcagccccgccctgcagcctgaccacgcctgccacccaggagcgagccgtggcttggaactgtgggggattctgggaggttttgcgctcttgccactagaatgcgtctccattagcatggaatagtcaatgcatggacatttttaatcctcagccaacgcactaattaaattcctggttgcaggtggcctgccacacagggagctgtgtccatagcaaagtattttccaggaagaagtgggtttcatatcaggactgtgagtcacagtgcaaaatacatgcgccagcacacattcatacaccactgcacagaagtttctggagaagaacttgccctcaccttctgagatgtatttgttcttactcctgcatttgcttcatagaccactaatgggttgcaatccgaagtttggaaagcattgtcttataggaacatggagtccagggtccggaggtggggcttgtggtctctgttgctgtgctggatggacaccgaggggaacaggctgaggatggacctgtggaaccacatcttaaagacgttatttaaatctaattttcagtttgcctttattgatttgagctgactgtgttgatgcccctagtgactctggtgggtacctgctctgtgtcagggactctacagcggcaccatatagtttaataaggagatggcaccctttccgtttcttgctgtgcggaagtggcccagagaaaccgcgggaaatgctccatggagactgccattttctgtgacattgggccttatgctgcctttagatgtaggcagtgtctctttcatggttttttgttttgtttttttttttttttgagatggattcttgctttgtctcttagactggagtgcagtggtgggatcttggctcactgaaacctccgcctcctgggttcaagcgattctcctgcctcagcctctggagtaactgggactacaggcgcgcaccaccacacccagctaatttttatatttttagtagaaacggggtttcaccatattgaccagactgatctcaaactcctgacctcatgatctccctgcttcggcctcccaaagtgctgggtttataggcatgagccaccacacccggcccccttcatgtttctcaattcctaccttttctcaccggaaaacattgccagaattttcagactaagctgtggctcctggcggactctgttctgagaacccgggtgccggtgggcaatgcgcccaccaatgcggtgggaggctgagggaagactctcctttctggcacaggtggctgtgggactgctgtgctcctctcacacccaggctccaggaggagcagccacacagaggctgagatgggggggccagggctgggaaatgctgtgggtgtgggctgactgctgccatcacctctaagaatggggggctgccccaggaagcccagtgttccatgccctgctgctgctggagcccacctcacaaatgttaagcccttgccgccgcgttgctgtgaaccgttgtactccctagcataaaccctgtgagtgcactggtgcactgtccactagggaggctgagtacatcagaacccacagttggccgggcgcagtggctcaaacctgtaatcccagcactttgggaggccgaagcgggtggatcacttgaggtcaggagaccagcctggccaacatgatgaaaccccatctcccttaaaaatacaaaaaaattagccgggcatggtggtgtacacctgtaatcccagtgacttgggaggctgaggcaggagaatcgcctgaacccgagaggcggaggttgcagtgagccgagatcacaccaccacactccagcctgggcaacagagtgagactctgtctcaaaagagagagagagagaaagagagagagaaagagaaaaagagaacccacagtcaaggaactgctgaatttagcaacaaacatctttttactaattcatgtctttatttatgaaggaagtttcattataggattccttaaatagcaagagtttctgtatcacatttagaacagcattaggtttaccctgcttttactgtgctctggacccagcccttgagtgtctagagacactcaagccatggtttctacttacatgggacggtgagttaaagttgatgatatttaagagcagttttaattcctgaatgccataattctgctcaaatgtaaaaggttagtttaccatatatttcatcacacttgatctattgtcgaattcaccaagcactgccgtgtgcccttgccaggcatgccatcagaaaggccggtccctgccctcaggaagtgctggcagccacacccctgtgcacctgttcttcgcagggcagacctggaggttgttcctctctaccacagttgccttgggggtacacgtaaaggtggtgtagtttttttcctggttagccttacttttacctaccttttgagaggaagagaggatttgctcgtcagcagtatcttttgctgaacactaagctaaattctaagggaaaatgcaaataaaaacaccttgcccttgaactattagaagaaatgaaagagacaagatgaatgcaagaaaaatacagagaacaaaacagcacacaacaagcaattatttatgttaattggtggcagctgtacagagctgggatgggcgtgctgggaatgctaggccgtctgggtgtcctggaggttcctccagggtgactgagaaactgaaatgaggccagctctgcagggtttttcccctcccttccctgaagctgtggaatggaagttgaataagacattgcactgaagatgaggagggtatggtccggtactcagcacttcatgttcatgctccatgtcctgggcagggcttgtctgtgttaataaagttttattggcatgtagccacaccatgtgtttgtgtgttgtctgttggggctgcgtccctgtcttctcggcagagcagaggagcaggggccgaggcggcatggcctgtgcagaaccgttcaccatctgggcctttgtgggaagcttgctgtctgggctccagttgcgtcttcatgtaaactcaaagtaaacacatgtacacaataaatatcaacaacggattttctggctagggtctcgcagactaacagatttcagtggagctgggtgtaagcacatctctgtatttattcccaattatttttatcatttttaatggaactcttaacagctcacactcctttggcatcctctaccacaactgtttaatgtgtgtgtgtgtgtgtgtgtgtcttttgagcaaaggcagaaatcccttgttttgatttccttttctcatcgcagcagttgtagcgctctggctttatacgctttgagaacctaaaaagcaactgggtctcaacaccaactcatggcctttttttaagtttgtgtatgacattatacacatatgtataaatatatgtgtatttttgcttcagtggaatgaaaatgtgcgtcacagactgtatgttcaatgttttctttagctgctcacagttataggattgtgcagaaacgcttagctatctttgttgcttgtgtgctgactaatgaaataattgatttttcctcttttgcatttttagaatcagaagattattttttcaagtaagcttatactataattcaatgattgatggttgagatctttgctcatattttcattttcagagattaatatatgcattttgaaggagacagtgtatttagtaaaacaaactgaaatagctccccttttatatttaagcaaaatggatagaaaatcagtaacttgcttttgaatagtacctggcagtttatgtggtattttgcagttcagtgtagaaataaatgctacttttttgtgacacagcacacttttagctgaaacgtggagtatacttttaccttgtacattttcatttagactggattttaaagctaccttagttattttttataataaattccagagttttccaaaattctctcatttcttttaaaatgacacgtgtacagttccattcttctttgataatatgtctacatttataaatattttctaaatatttcacatatttccaccatgcaaacgtgtggaaatgtgtgaaatatttagaaaaaatgtgtacgtttgatcctcaaccacgtggaatttgcttttaccttttagagaaatcacacttggaggtgatgtcatgtgtccctgataattacacgtaaatgttggctgttttgttaccttctgacccacataggtcgtctcttgggatagcacaggtagcagaggatgctgcagaggccagagccctcccagccctgaccccacacaggctcctatggaggccggagccctctcagccctgaccccacacagtctcctgtggaggccagagctgggtcatggactgcaggctgccgatgggagcaagctctcatgcaggagtggctgtctgtccattgttggtctgtggagaaggttctagagccaaagaacctggagtctagaatctcactaattagatgtggtccccagcagcatcagcatcccctgggagctggttggaaatgcagcctcttgggccctgccccggacctgctgaaccgaatctgcagtcaccacatccccggaatttgcaggcaccttaatctcaggaagctctggtctggatcttcgctttcccagaacagccgtgcatcagaatcacctttggagctgatgagacactgcagagtcctgccccagccccgacagatagtgattcaattggtctggggtgattctgccacccagccaggagtgggacccgtgctctgaaatggtcatccctgttggctgaggggcgattgagaaggccagcacctgctaggtgtgtgtctggaagtctgcagcagcttcaattacacagcccagctgctgggagcctcatctttaggactctatccccaagtggacatcttattcctaaagagcaccccaggccctggacctgtgtgtaggtgccgtctgcagccccatgacggggatggagatttgcaggcgtctagccacccagcctccactcccttcccttcctgttcccatggaaacagattgcgggaacactgggcatggtgctatctttacccggtttttggcgatctgaggtctgtttccatgggaactagaagggaaggggacggtagtggagcagctagactgcttttagattttgatggcagcctctgtgctcactgtaaaacctgctttgcccaagtttacctctaggccaggggtccgtgcagctctgaatgcagccaggactcatctggaggagaggccggtggaaaaggaggagaaaaggaggaggtctgaaaatatccttgaaaatgccagtcattcccttttcctccaggaagccatttttaggtgttggtataagttatttaaatgccatctttagttattatttcttgtatggttttattgaacataataacatgtttttattcaaaggaagtgaggagatgagtcatttcgataggagtgatgtctccgacgtggggaatccctgtggctcggcagtgcgagtgagtcacagctggctctgtgtgttgggctggaaatgagggcctgctgggtcagggcagggccgaagctgagtgagatggggaggcttgggttggtggtaaggacaaagtaaagtgatgctgacctatttaagtatttgaagatgaaaagctaaattctaatctaagcaggccctggcctgagtgaatgctctgagtgttcagttatggagtggagtttactggggcaatcatggtgctctgcttttccctcccttccctctgtacagtcagggaacagcaccctcttcctccctgccagggagcctgcacctggtgggaggccttctcctcctcgtttcctcccgcccgccagcgccttgctcttcaacactggtcttgtccaccggcgtatgtgtgtttcccgatttcaagtgtatttgttaattatctagtttttaagtaaaaatagagggtagttttggtgattgcctggggtattggggatatttggggagcagtggcccagattatcttggtgaaagtggcagcagcttactttccttggaggagtgaaatcaagtcctcgttcttgccgtttgagggaactgtgttcacttcatcagactctgggagggagggtaggcacgaggttgctgtctgttgcgggaaagctgcccctccctgcctgtcctcccaggctgtgcgggcactggcctctgtctgaagaaatgtgcttaggtctccatgcagagtaggggttggaataaatcgattcctacttgtcaactccagtggggaagggaataaataagggccagattctgagagggaaaaagaaaaatctaaagaagacatgactttccgtgcagaggaagttggcggtcaggctggcgcggcccacggtcgcttagatcatgaaaggcctctcagagcctgtgcatccccatgaacagcggcgtcagctgccaagcatggcagttatattccctcttgccagcggcatcctgtggttttctctggtggatcccaggaattctcctgcctggatctgacggtggacatataagacagacagatcctttcagcatcaggtatacacaggggcttcttctgcgggtgagggcacagctcaggatgagacggctcctgcagttgccgatcagtgcctctgaagcccagcaaactcagcacaccctcggcgtccggtgctgtggaagactgctctatcacacgcggttccagaggggccagttctgtcttccaggagggcacgtatctttaccgctgcctgggctgcctggcgggatacatggtacctgtctgtggtgctttccccatgaataaccctcacttgcttttcctgtgtgagagcacacgcacgggccttcgttaccaaggcagtggaaattggtctaatgaactctttctgcctggccggaggcctccagaacacagcggtggggtttgtggccccattagttagagaccaggcagccttcccctgggttctctgccctctgtgacagctgctcctggggacagatgcactttcacatcctgcctcgcctggccttgcaggaagtcaggaagctctctcagtgctccctgaaggtgcatcgagtcgggactacccgtcagaaggcttagtgtgccgggccccgcaggtggcatttgatgtgtgtcacacccaagagctcctctgtcacactcttgggtctgctcactgccggtaacatcaacgccagagccatcctctgacagcactgttttgcattctgtccttcagacatcggctgaaatatgcatctccttggatttctgtggccagattaagttatttcaccaacatgaactgactaggctgcgtcacgtctgtttccataacttggtctgcctcaatgatggttttgctgcttgaattgcaagtcattcttggaaaggctggtctagaggttatctttttttagctcttagatgagtgcccgtgccttctcccaggtggttgtacaacccatgactttcctagggtggcacgcgattaactgcaaataatttcttcttctggttcccttaagtgggagaaatagcagagtggttgaaccgaagtttaagttctaagaggatatcagatgggcctgtatctgtttctcctcttcaggcaatagaaaccgcttcctctctccagaggaaagtgggacttcccctaccttttgtcataatggacatactcaggcagtgaggagtcatcattccgccagagcacaaactgctggccagtcccaagagcttcgcgagcgtgacccgccattgagcctacattaagttgcatggagcaataggcagagcctcgcaggcccatcccagacaacacagagtctcccctggaaatatctaagaaaagtcttactggagcatttctgtccacccccactcaccttgaattggataccgagttgtgaaaaattatataaagtggacagtttttctttgtcctaaaggaatatatattcctcagataatgaatgtgagcaaatgagacagaagtgcttcatgaaagctcagctgttccctgtgtgtttgatttaagaggcacttgtggagctggtttggagcttggtgaacaaggaatgcttaggaggctttgtgaacgcaggcgactgaaatgactctgatcgttcatttctgtagggaacattggctgttatatcgctgatcagtttgtctgagccttaaggtgtagggtgttttgctgcgtgtcctggtgtggccccgttagttagggaccaggcagccttcccctgagttccctgcactctgtgacagctgctcctggggacagttgcaggttcacaggctgcctcgcccggcagaggggcatgggagcaccctacttgtcagaagggtggtttgttgccctctctgtgccatctttcgttctcagggctgtgtggaagcttgagaggtgcatgtgaagaacttaaaaggtcagcactttaccaagggaacaaaccacacaagaaaagagacggaagaacagcagacaggaccctgcgtgatgattttccgagaaggagatgtaaaaacttggtcaaatttattatttttctttctattgctgctttttaaatgttatatttcagtatgaaaacatgaaaaaaagccaatcaaatatcaagagcctctatctttttccttttaaaggcaagtttctttcttgacatttttttcctcttctactattctaccacatttcataccaaaaacctcacccacacactttctctaattttgtatcctttctcctgtttctctctgttgttaattttagctggcatggaatgatttgagctttgatttttatctattgggaactttttaaaaaaatcaagacaaattagcagaggaactaggagatgaatctgacgttgtatcagttgggtcagatcagaactggaagagggtgggctgagccgtgttagagacgcgatttcatcggccatctgctgaggcaggttgtagtaatttgggaggggtggtaacttctccagccctcattagatctagggttttgtttgtgttttctcattagatacacaatggctccatcaggccagtgccatcattgcttccattttacagccaaggaaactgaggctcaggggctttaagtaactgcctaagtcacacacagcctagaatgaggtgaacccaatgtggccagagcccagacttttgtcctctggcccctttgtataaggctcttgtttgagcatgtttgaaacagtgtggggctgggcactgcctgtgcagtaaactcccagccacgatgtcccccatggggcacccccaggccagcagccacttgtgtgtggtgcccagatgcaggacagaggccatagattgaaaaggaggtgacctagctgaggctcagctagaattctgtgcagtacagtcagcatttattgggtacctgctgtattctagtccccatggtcaatgccaaggataatcaggaagcgttgtccagaaacacctgcagaggcagacgagacacaaggatctgggccccatggtgacaggagcttggtttgttttgctcactgctgtctccccagctcctaaaatagtgcctgccagagtaatgaccccacaaatagctgttgaaatactgaatgaagagatgcagctttggtggcgtcctgcaggccagagagcagggaagactgtgggccggcacaggtgtcccagggaagcctgctgtgagctgacagcaaggagtggcttggcaagggagatgaaaattgtttcgtacaaacagcttgtcggttcatattcttttctattcccaccaaagaatgagacagctccccctcccttcctgcccacacttgttagcctatggtctgacccccttcttgtttgcctgtcatgcccattttaagctgattttatctgaagaaagctggagtgggggagatccctgggtgtggaggattgcagaggcctgcccctgcccgccagccccctgcccgccagccccctgcccgtcagcccgagccctcacgccaggccacagtgggagcagaacctctacgggggtggggctgggttgggaggggcattgccgctgcttggctggtggccacagtggaggtgtctgtgatgtgctcagaccgggctcagaccagaatgcacgtctgctcagggatcatctgcccctgggccaagccctgaccctttcccattcccttgtgcatgtgggtgctgtgggaatggcctggttcgggccctggaaagcagagatcttcccagtattccctgattcccagcgagcggctggtgcaggtgtgcacggctgtcttcctagcattgcaggctctccctcctgagccagtgtctcctgtggccgctgtgtgtagacagtggaactggaagcttgggccaggatccagacacctggttccagccctggcttgcattcctcccacactcatcttcaacctgtcccctctccctgagcctctggatcgcctcctccacaaagcacaggggtcggatatatgactccttgcggcttcctctgctgctagatcatatgagtcgataattatagacttactaatgcattaaggacagttatcctgtttattttagggggaactctctccaacttggtttgaatatagcctcaggatttatcaagtgttggatttgtcaaggtgacattttaaagaatgttctaatataattattgcttttcctgtttgcagcctgtgtgtgtctttgaatcgatgttttgggttttgtacttgcttcctgaattggtgacctacagcaaggcactacgctaccctgaactacattatgctgaacaagtaaccagatcccactgagctacccagggtgaggatggcttggaggttgtgttacaaaagctacatgttattttgcccccccacatcacagagatgaaaagtagcatgaaaaattcatcacactccaactcagtcttccctggctataggcagcctgtttctctgacttgctctcagatttgcatttccatgtggattttctgtgcttctgcactgtgtccctttcttttgtttctctttagttttttttttttttttgaagagacagggtcttgctatgttgcccaggctggagtgcagtggtgcagtcacagctcacagcagctttgaactcatgggctcaagcagtcctcctgcctcagcctccccagtataggtgtgcacagccatgcccagctaatttttatatttttagtagatatggggactttctatgttggctaggtgggtttcaaacacctgggctcaagcaatcctcctgccacagcctcccaaagcactggggttacaggcgtgaggcaccgtgcccgcccactgtatccttttttatgcccatttgccctctctctcggccagagacatggccataggggactttttggaatgggagggacctccagtttcacctcctcattgtataaaagaggagatgggagccagggccgggagtcaccacgggtaccagaagcagagtgggtcccctacctggggctctctgcctacggctggctgcctggaggcagaggtgttttatttgtagcacctccttttctttactgttaggagatcttgagactgactggccgttgccaaggtctgcactatccatgagctctgaggcactcacatggagacgtgtgacatctcccttggtgggacacctggtcccagctcaagttggaaatagcttctcaagggtcttttccccactttttctcccatctgtctcatgacaagccctttgcctctttgatcctaaatgaacatagggtgagatgatgcataggtgagctgtgccgtgcagctctcaaacatggtcatttttattttttttaaattttgcagcagagccccagtttgccgaggtttagaatgacctctttggttggcagcgttcctttctccctggaacttctctggtgggtagagtggccagggatcggcatccacaggccggggctcggccctgagcgtctgtggggcctggagcagtcgccatggctgtggagctgtcacctaggtaaccgacattccgccagcgaaacagtctgtccacagcaggaggaaataaaaaatgaaactgcagcgtcaattctttatgcactacggttttttgagtgctactttgattttggaaaaaaggctgtttcacttctccattggattttggcctccgtgcccctgtgtgaccctcacatttcctgaaccccatgtatctgtttttacagtgtcttttaatgaaagatataatacggacacagttcagtttgtattcctgaatgactctgaggaggactgcgtttcatataagtttttgtgaataactggtaaggcagacataccctgtaacttacttggttaggtttgtgagtgttcatgtttttaaaatgtcccttcctgtgggggtgtttttccatttgacgtgctctatttccttagtaactgttgctctgttatgggagggacttaatgacatttttcaagtgcaatattgaattaatttatttcctggttagtcctgcccatcttcccagtataaatagaacctccatgtgtgtgtgcgtgtgtgtgtgcgtgtgtgtgcgtgtgtgcatgtgtgtgcgtgtgtgtgtagaatgatgaccatgtgcttgctgccttgggggggatcttgactgtgaccttgcgtcctgggtaagttgcctcttcctgtattcccccctctccttctctcttgatttaagctacttgggtttagggagcttcctgggcctcaggagtagcatgggaagcagtgccttcagggcaagaggcccagggtcagtcctgctctcctgctgccagtgttgggcgcagttcttgcgcctccatggggcagcgcttgctctctctctgtagcctgagggcatttaagtcaatgacctctgaaggcctttgctggataggactttgtgggaagtgtaagtgcagcaggctcaccacttgtaatcatcatctcaactcttctagtggggtggtgggaaaaccagcccggagggtcccagccaagcaggctgaggagcagcacctccacctgggaaatgccccttgccaggcgcagctagggctgggttaattgtgtaggtgtttgctgagccttctctgcgctgtgtatagtactcagggaagcttcacgtaagtgtcttccttcactcatgtgttcgctcaggaaatacgtatttactgggcacctgctgggtgccaaggggaactggaggatctgctggccactgcctttgctctcatggcacttgtgggggagacgggcaggcatggtgcaatcaggacacccgtgtggagtcgcaactgcagatgttttgggaagccgaccaggtgctgcgggttgtgtagcagggtctggacttagactgggggccatcaaagaagcatctccagggagggttgtttgggctgagactggaaagctgagtggcagctcatgagcaggaggctcacgagagcagaagattggagggacggccggcaagcagcgtttgttcagctcctccaacttttacccttccacgtgtttgctccacagatgcccagcatggctgtgctgattgctggttggtttctaaactaaaagcacacgtcttgtccagaacagggcctgcaggcttctgctgactgtgctggccctcagagttttctctgggtcctgatcacccaccctgcgctgcctgttggtcacctgacacacttactgagtgccgctgggttctggccccttctgggtggtcacagtctttcactgagcagaacgaagcttgcacctctgctgcgtattcctagaaagggtagctaatctttgttgctagcagtgagaaagaagactttttacagcatttataattgcattttaccttgaaaattgcattgggggagactcagagtgtatataggaataggcacgttatccattgatgcggtaacacagctgtgttcaccctgcttttgttgggaaccgcacacatcactgtcctaaaaatcctggccatgaccacgcttagacctcatgggagctattacacacctgtgtccaacctctcttttagaagatgtaaagttaaggattggtgggggtgattaagccagcataagaaaactgggaagttggttgtttcttctattttgatccacattggcctcagtctttcccatagccttttgacatgtgggatgtatgataacttcatttttctaattgacattttgacaaataataactgcatatatgtggggtacaatgtaatgttttggtatatgtatgcatggtagaaatattcaattcaaatgaattaatatatccatcacctcaccaacttatcattttttgtggtaagaatgttaaaaatctattattttagcaattttgaaatatgtgatactttttttattaactgtggtcaccatgcaatgcagtacgtcactaaaacgtattcctccagtccatctgaaaattttgtatgtttgatcaacatttcccttttcttcatcgttcttcctcctgcctctggtaatctcctttctaccctccttctgtgagattgactctttcagattccacctataagtgagatcatgtagtacttgtctttcaattcctggcttatttcatttggcttaatgtccatccgtttcataagtgagatcatgtagtatttgtctttcaattcctggcttatttcatttggcataatgtcctcccgtttcatccatgttgttgcaaatgacagaattttcttctttttaaaggttgtatagtactccattgtgtatgcataccatgttgtctttatgtgttcatccactgaaggacacttaggttgcttccgtatcttggttattgtgaatagtgccgaaatgaacacgggagtgtagatatatttttgacatacctatttcagttccttggatatgtactcagcagtgggattgctggatcatatggtgattctatttttagtcttttgaggaacctccatactgttttccgaaatggctgtaccagtctccattctcaccaacagtgtacacgggttcccttttctccacatccttgccaatacttctcatcttttgtctttgataatgaccattctaatgggtgtgaggtgatagctcattgtggctttaatttgcatatcccagatgcttagagatgttgagcattttttaatatatctgtcagccatttgtatatcttcttttgagaaacatcttttcaggtaattgcccgttttaaaaattgggttgttttcttgctactgagttgtttgagttccttacatactttggatattaggccctgatcagaagtatggcttgcaaatattttctcccagtctatcggttgtctcttcattctgttgattatttccttatgataacctgatttttaaaaaaagtgaggtagcataacttctgcaatgaaacaaatagacaaaattcccacaataaaacaacagcaaaaacctccctgcagtttggttttctctctgagtttagagaatgagaacaaataaagtctagcatatttgcacaccaaaagcatcatcgaaaagggcagagaaaaatcaaagctttagggcaggtgggcttctgtttttatctggcaggataaattccatttcccaaagttcatgatgctagtgcaactagttttcttccgaagttcctgtaggacctgcatgttggccatttttagatggaatgttagaattcagagaaaaaatgttttctcacattttcaagcacttcaaagctaccatttacacaaataatttattttttaattaaaatgttacctgttctttaaacttgaggactcctactgggccataccttattaactgagaatgttactatagatacatgaaggtaatagaattggatgtcttagtatcattaaagtacttcattaatttataacatactccttgtaattagtacgtatcagtgatgtgttacttcactaccttctgtttatagcaacatgtgattaacagagggctcctttctgttctgtgctctgttctcttaagttctttttctttagtttgatgatgaaaaagaagaatgagattacattttctaaaagttggttataaattgattaggatgaagtgataacataaaagaggtttcttttcctgaatattggagactgatattcaggattctgttttaaaagtctgatcctttgggcttctgtcattcttgttaatattgctttatgtttaatggaacattaaaatatctgaaaaacattttgtaaaatgcttttattattattctattttttttttttgagatggagttttgctcttgttgcccaggctggattgcaatggcgcgatcttggctcactgcaacctcgcctcccgggttcaagtgattctcctgcctcagcctcccgagtagctgggattacaggcatacaccaccacacttggctaatttttttgtattttcagtagagacagggtttctccatgttgatgaggctgatctcgaactcctgacctcaggtgatcctcccgcctcggcctcccaaattgctgggattacaggcaaaatgcttctattgttatgtaacatatggagcagtttatagattaaatttgcttttccttcctattctcactaaaaagttaatgtgggcatttgttttccttttaagaatccatttttaggccaggcatggtggcacatgcctataatcctagcactttgggaggccaagccctttgtgaggattgcttgaggcaggagtttggagaccagcctgggcggcttagtgagaccctgtcattcatagatagatagatagatagatagatagatagatagatagatagatagatagatagatggatggatggatagataagatagatagatagaatcacttttaaaaactgctccatgcaagtcctgcattttcttcctggagtgctgaccagtggccatgcaccacagaccccagtctaaggccttgggaaccagcttgagaaatgagtttcttccccgaggtgtctgtgagggcagaatggcccaggagggacatttgaaccttaagaggagcatagctgtggccttgggggcaggtggatctcctcccaccctggcagcccctgtgggagcccccatgcccacagtggggtcgtggaggcagctccgtggcttttcctttctgtcctgtgtaagcctgttaattgtaatgcttctgctggtcatcaggaaagtgacctcttgcttttcagtttcagaggcggagcacagagagctgcggctgggacaaggagcacccgcgtgcaggtgcgaccctgcaggatgctggcagcggcgtggccaggggcgcccgtgttctgagggcctgagggccagcccctccacccgcgccatggcctccgcgccctggctggacggctgacgggagcagggaccgccgccgcccaggtgccacacccaggtaccgcccgcccgcgcgagagccgggcaggtgggccgcggatgctcccagaggccggcccagcagagcgatggacttggacaggctaagatggaagtgacctgagcctcgcccggcggcttcctcgacgggacagcgcaagagttggagcacaggcttgtccggggagcagtatgccggaagctggttttcaggccacaaatgctttcacaggtgagcatgctccaggtaatccgaggctttgcctccactcctgggaggcaataaactcccaaaccactgcatgcagtgaacctacctttgcagtcaggagctgaaggccaacgcagtcaagggctcaggctgctgtggtgactgattctgacaaaataataatgtgttttccttcgctctctcaatagcagtttgaaaaagtgtttgacactttttgcttctgtttttgttgaatgataggatacacacaatatcctgcagtattcgcagcgtcttccaagtctctgttctctaaggaaatatgtcacttgctgagcgagggtaggggaagtgtggtttctttacagaaccgggaagattctccgagggaaaagattaattgccgatgtgtgcttggtgcctccccatctttaatttctcacatttatttgtgtgcttggggcaactgggcagaactcgtcttgcagtgagcggggagaagtgggacaccccagtgtgctggtgatttggccctggctggcagtttgtagggaaccacacagtctggctggtgcccagagccctcgcccaagacacaggagattttgaatttggatcctggctcttttgtctgattcatgtaacattccaggaagccacttaatcctctgggcctctggctcctcgtagacagactgggctccgtgacattgaggaacttcatggaatccagggagaatgtgtttacataaaagaggttttgtggaggttgcctttcatttaagagaaagatggtagaaatagtcacaagaagtgaccctattctctggttccgtgagtcccagaagtttgcagcttttcagattttgtggagggagcaggtcaggctgttgggatgcctggagagaggggcaggggctcaggcttgattggcatgggccttctccttggattagatgtcagctcctagacagccttgcactcctccgcagtcgccgtggcttcggcgtgaagagatggagcgccgctgtggtgcctctccaaggaagaacgaggggacgggtcttcccaacctcggccgcttccgtgcgcacctgcaggcgacctcctgaggcagcttgcaccacatagtctgtgacatggggtctcagtgacagtgccttccccgagttgtgggaggtgggtcagggcccgtgctggttagcttggcagctgtgtagatgtctccctctggattgtgaggggctggttattctctggcccatgtggatgagctccgcagctgtgtacaccttcctcccaggttgtggtgtgcgggtcatggcccatgtggatgaactctgcagctgtgtagacgaagggttgggggagcacgtgcaaagctaagctctcttgaaccatcttcatacctgcagcccagctgtctagaaaccctgtccttcctcatccttactgtgtgtgcttcagctgtttccgtctcaggagcagctccctcgtggatactcctcccctccaggcagggatgggcagctccctcatggatactcctcccctccaggcagggatgggcagctccctcgtggatactcctcccctccagtcaggggtgggcagctccctcgtggatacccctcccctccaggtgggggtgggcagcagaagcaactgagaagtggctgggtgtgtgctcagcctccttgtcccttctccccacaccccaggaggcagctggggaggagcggcacctaggatttgatgtaaagaagctcttcagagtagttctgggaggaagagggaacaagaaaagaaaaggaagtgagcatgggacaaaaagagcccgaggaaaagtggcacactcttaggaagctgccctgaccatggacctgacggcagggtggaggccacagggtggcccacagaggccagggttctggggccgtctcctcaccctgctgcacctgatggtggtccacgtggctcccactgagacacccacgccatcctcacactctggggtgctggggatacctctgccccaaaggaaagggaaaggccaaactgaggctctgtttagaatactcagaatcctgtggttctgcctggaggattcttgcagataggacagtacctctcacatattaagccaaggtatatgtcagctgctacccctggggcctgtgtcaccccaccttcctccccacttgctcacagtcacccacttgtagctcctccccagctcacgtttttttttatttgtaatttatgaataaaagctttctatattggtaggttccagtgagatgttttgatacatgtatgtgttgtagagtgaacaggtcaggctaatgggctctgctcatcactgcacattttatcatttctttgtgctgagaatactttggctcctctctttcagctcacatttatgagtttcccaagaatctgtttccttactttggcctcttccccccagtgtcagcctggctgaggaacaaggtgtgccagcggcagtggtggggtgttcgccacagccgccgttttggagccacagtgtgccgggagccgtgctcctgctatgtgtcctttgccaggtgtcacaccaacacagcgccgcgcggggcacactcagtgcaggcaggaactggctggtgccagtggcctctccagattgtcccacgctgtgtggccttgggtacacacgggttccctggggagcttccctaccacctgggtctcaccctcagagactgaggtttaattggtcttggcatcacctagacctgctaaatcaggactctcatcctcacaagatcctaggtgcttggctcactttaaagtctgggaagcactgggagctggcacccagcagagcagtgttcagagagaggccagggtgcttgagggggtcatgtctcaaaaaaaaaaaatcacctgacttgtgccattccttcagcaggggggatcaaaataatgggtctgcctgttctcagaccatcatgtgttgaatagtgttcacactgttgggtgcgccagcacctgcagggtggcagttttagcttccccatctctctctaggaagtaaccagcagtgaaataaggagatgtgagcgcctggccttctctggagctgggtccctggagacttggctcatcatttttattcttggtctcccttcccatctgtctgcccacatagtttgcaagagtccctgtgatgtaggatgcaggggctgacacactctgcctgcccaggcagctgggtgaaggtgtagctttagaaggaggcgctcaggagtccggtgcccagcccactgccttagttgggttgctgttcttaaaattttggattttgctgattctctgggctaatagaaaggagtcttgccttagataagacattgaggcatcttccctaggctttaaattttgttttagggccaggcaaacatcactgggcagttaaccatatgtccactaaaatttgtcactttatgttccaattctcttggagggtagaggctcagaattcctctttaagagggttttgggcagcactcgggctgtgggggagggctgggagacctgccatgaagctgcgtttgtttggagcgtgtgaaagtaccatgaagggggtgggagtttggaaggcccctgtccccatgccacgttggcaatcctgtgtgatggagttcactctgacctcgtgcctcctgggtgagtgtgggtatactcacatagatgcgtatttaacttcttaattatgatcttaggtgaatgcttgcatacaggaattgatacattatttttagttttctcagcatatgcaatttagaaatgattttagtcatttagatagtattttatatcaaaaattaattttttccttttacaagtagcatctgctcattgtaagcaaactcggaaagcgcaagagtcaaaagaaaaataatttcctacacgcatctttgccatgtgactctttcttcgggcaacattttagtttacatccttccagttttgtcttttgcaaatttcttcctacagaactgtgttcataatagtatttaatatggtaacttgatcattcccttttaacattacattacgagcatttttcttataaatacgattttaaattgctgcataatattttcatgtacatgtacttgaattttaaaattgtgttcctgttgttggatagtccactttttgacggttttcacccttatgaataacgctttgatgaacacctttgtgcataaaagctcttctgtatatttgattatttccttaggataaactccctgaggcaaaattattgggtccaaagatgtgaattctgttacagcttataattaaatttccagaaggattgattgatcctaacttttgaggctgtgctgaaactggtttccttctgttgccagttgcctgttcacagtgactgcgctcagaattgggtgtgtcctccacggttcagctgtgcgtggagcggcccccacctgcctcacagggcatttgtgaagctctttgcagcatgcggctctaaaggccgcctgagtgccatgtgttgtgtggagcaccttcatgttacacttgagcatgtaaaaacacagatgtcctaaacttactgtttttgtgcttccaggccctctttctgcctggctgtcattcattgagcaatgatataggtgaatggacttgggaaagataagactctggctgtcctaaaaacaaacccccagttcctctgagcagagggaagcagggacccttccgggctgggtccgccggcctctgtcccaggtgccgtcatagtggtggagatttcacctgaggtttcttgtggttttgactgacttggaatgcatcctttctgggtgtcaccgtacacatcctaaagaggttgctggcttgagattctgcctcttcccggcccatggtaccacccttggatgctgcagaggttttgcacaattaattttcttaggctttttaaattattttaatgttagagaaaaacatttaacctcaaataactaggtaagtgaatcaaattcctatagaatttatagcgagtctttctggtgaaaggagaatcagatctaattgttaaataaattaaggttatttcgctcataaaggaggaggagggcagttagtagtctttgtctgaaagtgctattttgtggatgttggtgaccaggttttcttagccactaatgagactgaaaaagaatcacttaaatggaatagttggagctgtttcccctgtgggctccgagtgaaggatgtaggcttgctgggggtgtgactgggctgctgtgttcaggagcagctcccggcgtgcccttcccaccccacagaccttccgcgcattcctcatccctctcctctgcaaggttgcacctgtggctgacccacggatgccctcagcccccgccttccagagctgcccagagaatgctcgctttaggagatattgagagctgttcctccataaaaggagtgggggtgaattaatggccaaagcttggaagaagaaacttaaatcagtttctttactacagaacttttcagtctttaatatggggctgtgcagtatgaaggtcccaggtgggcaggcagcgggcagtgttttccaaatgacaagacctggaaggcattttagagagaacagcaggcagggacagcttctcatagcacgcactctggagaagccacaaatgttttgggggtcgcctcctgccatctgcagctcccgtgtgcctgtcccacctgcgccaatgcagtggtccccggcgggctgcttctgttgagcaaatattgacggagctcttgccaggtgtatgtcaagtgctgcagagaaacagtgtcatgagaccgtctccctgcctccgttctctcctctctctagttctgccgatgctctttagagtgaggttttagtgataagtttcccttgccccaaaactttccagggctgcttcttgcttcataacaggagtccaggcacctcttcctggagttcaaggcccccagagttgccttccttcattcttgtgttgtgaccaaagttcctgacacagtgactgtgagcccacccatcaatcatttgtgcagtttttaatgggatgctgttgctgatgctttctcatttcctgcagagtctctctttccaccaccttcctctccatcttcaggatctgtcttaggtccatgtaatcttttgtgatgtgtacaggagaagcctagacagtctgcctacttgcaatttagtaggtgtagaaatgattgatagtggctttttgtaaaaatatcaaatgctttttctgcagggaagttaagtttgctgagagagccatttgcacattctgtggtatgtgtacttggtttttccttcatgctgttagcctcgaatctagtcctcagttataaacctaaccttaattaataacgtttctgtgtgtaaataacatataatttatgttgttattcccataagcaccaaactcttctccattttcttcctggtaaaccattctatactgtttcaagataatcaaatgtgattatcttttttttagaggcatcgtggtagtctcatgtcgagatgtgtacttacccttttaaataaggatgagaaataatttcagtattgcctgaaattatatttattttaaggttacttgagtgtgtacaacataaagatagttataaatatctttttatagctgttaaatagctaaaatatccaaagcaattaaatataaaaattataaagtcagaaacattccaattaatatttaatgtgacagatgagtttgtttgctgaaagctttcattttccagctctttttatttatgctcagagcatcctgcagggagacttcgtgatggtgactgctcattgctgggtgttagggctgatagcacagccaagaccagtttgaatgctggctctactgtcagtaagtatgagcattgtttgagatgaatcctctgccactgagtatccaggatcaaagcaacttgcatgtctcattaggttctttggaaaatgggggcttttgttcattgtacatctgaaacttggatgttgtagttatccctgaaatggagccacttagctctggagaaatcaaacatgtgcagaaagcaggtgactgcttccatacgtggcctcttgtagtttcttgggtcctagcctcttcctctgttagtgtatggatgtctctggagtccttaatactggattctcctgtgctctctgttggcagatgagctcagaggctggggaaggcattgcttccaggaggagcagcctgccccggtcacgccccagttcctgctctgtgacactgatagatcagctgacctctctgaagtgcactctttaccacactgaggtagagataatggccagtgagtaggttctgtataaagattaagtgaaataacatttgtaaagtaccaaaacacagtctggcttatagtggtgctcgataaatgttcttccccgtcttctttcatagtcttcttgaagttgactatacagaaaggcctcataaaaatcaggggttcatttaataaatatttaatagttgtcatgccatacttctgtcccaggagtgtacagtctgagtgtcatcacgatctgcacagttagctgccatagctctgatgacatcacatgcaggtgtggaggtgggggctggcgtgggggtgggggctggcagggtgggagctgttgtgggggtgggagctgttggggttggagctgttggggggcgggagttgttgtgggggcaggagctggcgtgggagcgggagctggcgtgggggcgggagttggcgtgggggcgggagttggcgtgggggcgggagttggcgttgggtggggagctggcgtgggggcaggagctggcgtgggggcgggagttggcgttgggtggggagctggcgtgggggcgggagctggcgtgggggcggaagttggcgtggggtggggagctggcgtgggggtgggggcatgggctgcagaggttgaggattttagcttagctcccggggccctctgctcgtgggaatcaatctccagcacaagacatcccctctggttccttatatccggtttgatagggcttttagctgaacttcagccctgccacctgcctgtgctgggctgataatcgcctctcttccagagtctcatggagtcgtcacaggccaagggtcttcaaacttggctagaagtcaagtcccgggtctctgtgttttttcaggatactatgtttaaatgggggaacccagaaatgggatgcaaaaataaacaagtgtaacgtctgggtagtggtttatggttccgttaaaattttttaaccaataatagtccgtatgggagtatggactctttttcctctcaatttatgttggcatttgtagaatactccagggtggtgtgagaaagacatctcctggttcaagatttcctaggggcaaaaaaagaatacaaaataataacgtggtgccctagctgggcgtgtaattctgtgctctgttagcacaatcagccttgctgtcctttgtggatgctcaagtccctgatataaaatgatggtgcatatacttagaacacacagacatccactcatagactttacatcatctctagattacttatgataccacatacaatataaatgttgtgtaaatagttgttatactatattttaaaaatttgtattgttttttattttttagacagggtcttgctgtgtcacccaggctggaatgcagtggcgccatcgtagctcactgcagtctcaacctcctgggctcaagtgatcctcccgtcttggcctcttgagtagcttggactacaggcacatgccaccacatctggctaattgtttattttttgtagagacggagttttgccatgttgcctaggttggtctcaaactcctgggctcaagcgatcctcctgccttggcctcccaaagtgctaggattacaggtgtgagccactgcgcctggcctattttttattgttttattgttatttgtatttttgcctcaatattttcagtctgcagttagttgaatctgcaaatgtagaaactgtggatacagagggctgacggtacagctgtagagattgtacagaagaaaatacattaataaatgtttctagatgccatattgtattttaaagaattcctttaaagaagctatattccagttgccaagtagacaacaggcctccagactccctaaggagatgggggtgtgcccatttcacacgagggttctgtcctaggcttgctgggtccgccaaccctgagggagagaccagccacagctgctgttgggtttgcctgacttttatttttttgtttttgtttttttttagacggagtctctctctgtcgctctgtcgcccaggctggagagcagtggtgagatctcagctcactgcaagctccgcctgcctggttcatgccattctcttgcctcagcctcccaagtagctgggactacaggcacccgccaccacacctgcctaattttttgtatttttagtagagacagagtttcaccctgttagccaggatggtctctatctcctgacctcgtgatccacccacctcggcctcccaaactgacttttgtttttaatttttaaaaactttaatgcccttttgcagcaatagggtcttactatgttttccaggctgatcttgtattcctgacctcaagttatcctcctgctgtggcctcccaaagcactgggattgcaggcatgagccactgttccctgctgggtttgtctgacttcttaggaaaatcatcctgagatcagtgtttctgaatcctaccacctgtctcttgttatcttgtctgtagagccctagagcagcaggacccatgtccttggcactcactgaaaaagccatgggacccagcaggccctgccccaggacgacaaagcacggtgctaccacggcgcagcactcctcgtactgggagttggggagaaaaccaggctggtctatcatctacactcatttttttcttttgtgataaaattgcagaaaattcagggtgttttccctgcccttttggagggatgctatcttgatctcagcgcacgctgtttcacagagctgacataaggagtgaagattaattgtctgccacggcaggtgctttcgcatatgtggccgtgtgtgctccctgagacagccccaggaggtgtgggcgtgatccgagtttgtggctcaggatctgcacaggcccgagagaccctccttgaggacgcagtggccagtgggggccaccatgtcagggttgaaagtggggctgtctcagatcctcccactgtggcgtttccttcagaaccgagttggggcaggaggggacggagggagagaggcaggaggctgaagcgccgaacccaacgcaaatactaagcatttgatggggttgtctgtgttctaagttggaaaatacaaacttttccatgtgtaccttagataacctcactggcgtttgtcattctgcttttggaatgcttaggcgtgaaagcagcacagcgtcacggtggtgatgcttgcgtagcagtgtgagagtgcaaacctgaaaatgggaaaaaatggggcattttatgttacgtacattttaccacagtgaacataaacagttttgaaaaaaaagaaaattgctgaaataccattgagcttatcagaagagctcagatttgagtgtgggtcttgatgggaagtaggagagcagaaagatgggtgggaaagtgggaatgactgtgggtgggtaacgagggtctcagttttggcttaaggacaggtttcgaaggagatgggcggcccctccctctaacaacttgatatgtagtgatcaatgctctgttgatgtgggtttggcgctcacagagaggataggcagtgtgctggtgggctgctggtgtcctcacagcctctgaccaccagcctggacgtggggatacgtctctgcagaaccaggccctgccagtgaccagcccaccctccccgggggcactatagcaaccgtgtgttgttgcctgggactcacttccctacggggcattggttccagtattgtgtccactctcatggagtatgctcgtgcgcagagatgcagccacccagatcttcatctttgtaatgatgatcggggctgggagcagtggctcacacctataaccccagcactttgggcggccgaggtaggaggattgcttgagcccaggagttcctgtccagtctgggcaacatagcaagatgccaccagatgtggtggtgtgtgcctatagtcctggctactcaggaggcttgagccttggagtttgaggctgcagtgagctgtggtcacaccattgcactccagcctgggtgacagagtgagaccttgtctcaaaaaaaagagaaaaaaaagaaaaaaaaagacgctgtatgtattttgccctaaacagagtggacagtgatgtgtttatacacatgtgcatgttcctgggctcaaatcctggctgtaccacaccaccctgtgtggcatatggtgagcaacctaacctctctgtgcctcaacttccttatctataatgtgaaaatgacaataacaataggtactttagaggtttgttggggaaaatacatccatttatgcagataaagcacttgcaacgaagccagacacatgtgtaaacatgcaataaatagttattgttatttcaggcacactgctgctactcaaacatgactttatggcaacaggcagttgttagccatcgactcactttattgaccaaacttggcccccaaatatttgctaactctgagaccccagctcgctatctgcagagccacatgggcgtcccatttgccagtggcatctgaggacatccttagaagaacagctcctaagggtttccagggatggcagcattatcggaattcctgctgtaaactcacgtgaacatatgctcttctattaatagttcatttttaaacaacaacaaaacaagcctcggattcttgaagatgccttggtaagttgatcttatgtccctgcatgatgaattgttctgaatgtattccgtgaagatcgatttccccacaggaagaccctttattacctatttgtcatttagatgcaattattttgctgcattttataacaaagtggaaatagaatttaaacaaacatgtcgctgagcagtttagactccatatctttatcgttactcttccctgttgtttgtctgatgcaaacatttctgggcctggagagccagtcggcgttagcggttattgactttcattgaattttacgctgggcactgggctaggtgcttggaaatgacaaaactggaaaatatttcgtggaataaaatgctacataatttgcttggatggcaggcttctttggggcagctcatccatgtcacatacacttgcacagttagtttattctttagcgtggggtaaaagagagggaatcatgcaaggtgggacgatttcatttctgcatataaaaaagtgccacggggtctttgatccacctccttgtgtctttttaagatcctggaggcctaaagggatttctgtttctggcaggaatttgggcttgggtcagagtccaggggtgagggtaggcccacctgtcatggcactgggactgggctgctgggtgtggggcccagacctgcgggctccagacggagccttctctttgtgcagtccgtgcacacatgagcagccctgactcttagaaacgtggtgatggggaggagacggtgaaaagagtgtttatgattggagctcaggactggagaggaaccggggcagtgatgagcccagctatgttcacactcgtatctgtcatatcacaagtgagcccataagagggagcaaagccttctctcgcacattctttcaaaatgctttgaccagaagaagccttgctgttggtgtagggatgacggaggaaaggacgtggttcacttacgggccatgaggtgagccgcggaggcccactcctagatttattgacttcacatgtgttcctggagcacttgctgtataccagacactgtagtaggcactggggacacagggctgagtaaggtggaggcagaccccatgttcatggaattcacacatgtctggggagacagaatagagtaatcaaatgtatcctgccatttcagacagcattcaggtcccgtagaaaatcaagtatgggaaggagatgggcaagagatggggggaatggccgttgctgataggagggcaaggtgaggcctcgctaaggacaagggagggcaagggcacatagagagcagggagtgtgggctcaggaaagagcagccagggcagaggactcgggctggaacagagttggtgtttggggaacagtgtgtcagttgtccagaggccacatgcccaggagcagacaggcaggtgggcagtcactgtaatttcattcatttccaaaggaagggagaagctgggtaagactgtcagttttggctaggaatgtttgctatatatttaatacatttatattgtctttttctaaatcatcgctttgaaaaaaaaaaaaaaaactgtccctttctccaacactgagtttcaccacagtagaagggctttatatttagggttactgcactttatgtatttcctggctccttgtaagtgcattgctcagatgtgttggtgtgagcgtgagaggagcaggttgggggttgggcggactctcctgtgcgtccccgaggccctgggaaggaagtcacccaccccgtagtggagaggatgccccgtgctcaggtctggacagcctgggcctgtcttcaggagagtctggtgcaggaagcaaatgatgatgttttgcttggtctttgtcccccagatgcaggctgcagccatttggggtcagacacgtggagaatggggtctgctcccagcctgggttcacttctaagctggacccgccttggggactctgaggctttttccttctgtgtggtttcagcccccctctggcaggtgaccagtgccaccaggccctgctggaagttatcctcatgcttccctgaggtttgtggactgacttccctgctggaagttactctcacgcttccctgaggtttgtggactgacttcacagtttccaacggtggttcctccttatccgggacgatggcaggatgaaacagcgcagagaatcagtggtggcgctttgccaaatcgctctttcatctgccatactttgtctcttctcacctaaaatgagaacatctgatgcacttttcatgatatttcagcattaaataccgtcttttaaaaagataggaaccaacaacgtgcttttcccttcttttccaacagatccttcaggctgtgggccccgttcctttttgtttgtgcccctgggtgagtcctggtttctgtgcaggtgtcagcacagccccttgccctttcttcacaaccacagctgctatttggttataggaccctgctaccctgacccgaactcacacttctcttataaacgtcccattttcagaaactcacttctagcgttaatggttccccagtagctcaatcttgaattacaggattgttgtctccaataacttgaacaatttttataatctagattaccaaaacatgttttggcacctgcagggctcttcttttaattaaaaagagacttacgaaaaattaaagatctcttcgtttttaagtgaaaaacattacatcttttgggatgctgaatctgggtatgttttgtgaccaagagtcctaagagttctcatttctaaagtctttctaacacgttgcatttgtttccgtagctcctaggtcagtgctgcttctatagacagcaattagtaaacatatgttgaatgaatgaaatggtatttgtgatgatttggggactcttccatcattcaaattccaaattgcgaaaaccaaagaaagttgaatggataaatgtcaaccaggaaggaaatctaacagttttgtctcgagattttatcaggaacatgggtaaaggtgatgaaaaacatgcttatcacatttgcgaatgacaggagattggaaggggttgctctcccactggccttcacaatcaaaacttagaaacaacaatattaaaacattaagccagtctccaaatgatatgtggttaaatgataatagcacattcttatgctgaaatagtatgtagctattaaaatgatattgaaaaacagtatttgctgtcctggagaaaggcttacgatacatttttaagtggaaaaaagtacatcctaaaacaacatgaagaggatgattctgttttttaaaatgaagaataaagacttaatagacggatgcatgccagaatgctaacagggaccacccctgagtaggagcatgaggcaatttttactttcttacccttgttcatttataaagtttcttttttaaagtaagaatggaagtgttttatcaaaaatgagttaataataactgttcttttgtggtgaataaaataaaacatggggactggagtctctcttctgtggtgaaaaatatatcggcctggtgcagtgtcatagactgacactaggacccatgatcacttcatggcgttattatcaggaaagagtccatctgagaacagatagcaaaactctctttgctttcagaataaatggcagtgagtgtatgttggcagttcctgcattgtgaaacccacaacgctgtgtgaccttgggtgagttacttcacctctcttggcctcagtttctctgtgaaatcaggaattaacatggtctctgagacccccttctgatggtgaatgtgtggtttggtgattttgtggccctgcatcatgaccttatttagttctctttcaacaggggatgttttactgccttgtaaaatcctcgtgggactgcgtgtctttataggagccagggtgtaaatgaacagaattcagattggttctaatatattttacctctaaaagaaagggcatggggaggccatgaccttaaagcaggttttttctgttgtctgtgaagcctgtgatgattgagagtggctgggactggcgggacgatgtttgggtggaagagggaggccatctggatgcgccctgtcccggggaggcacccagcctgtaaggaggtgatgtctatctacactgagcgcaaggaccctgaaccgggggaggctgaggcggggcctcttgattcccaccctgtcccccagtggctaggctagtgtggcccgggaaatgacttccatctctccctccaggcatatttaataagaggccagtattttcagattctgccgcttctggacgaatgtctcagagagctgggaggcgccctggaggatggaacccttccttgagcgttgttgaggtgtgtcgggggtgccgtggcacaggccccttcccctggggggcatcactgttcccttgctctgcatccccgctgtttcccctgcccctgaacaggcgtggagatgtgcacgggacactcggaggccggatgctcaacagagtggagtgccgcgacggtgtggccgcagcctggctgtgccttcacgacgcagctgcaatcagaggagctgtgggacgctgtcccacgtggacacagcccactcactgggtgctgctcctgtgctgggcgctgcacttttattgtcgttaaaaatttatattaagatgcggccgggcatggtggctcatgcttgtaatcccagcaccttgggaggccgagacgggcggatcacgaggtcaggagatcgagaccatcctggcttacatggtgaaaccccgtctctactaaaaatacaaaaaaattagccgggtgtagtggtgagtgcctgtagtcccagctactcgggaggctgaggcaggagaatggcgtgaacccgggaggcggagcttgcagtgagccgagatcgtgccactgctctccagcctgggcgactgagcgaaactccgtctcaaaaaaaaaaaaaaattatattaagatgcttaaaaagtaactgtacaaattcaggccctgttttaatatgcgtttcagctgtcggtggtgtttcagaaatgcatgcaaaagaattgaaatcgcaaatctctgtaggtcgtatgaagaaggaaagaaaaaagcagtgtgagcgaaacccaatgaagaggtcgtaaaagtaggtgtgacctctgtgaaccctgaagcagtgggaacccctgggaaggtcacggatcccctaagggaagctgcacgtttgctattttgataaacagaaggtagtaatgatgaacaaatacaaaattattattataatattatgtataatattaatattattagttagcatttaattatataccatgggtcaggtgctgtgctgagtacttcatatatagcatctctttagtctccacagtgacttcaagaagtaggtattgaacctgttttatacccaaaagactgaggcttagagagacaatacatcttgttggtggcagagttggactttctacccaggttatctgacactgaacccaggcccttaacctagtatgtgtgatcttaaaatggagaatgtaaactacaagttcgttgccaccatttttttattttgttttgttttgaggcggggtctcactctgtcatccattttggagagcagtgatgcaatcatagctcactgcggccttgaccttctgagctcaggccatcctcctgtcctcctgcttcagcctcccgagttgctgggaccacaggcacaagccaccatgcctggctaattaaattttttttttttttttttggagagacagtctcgctgtattgcccaagttgttcttgaactcctagccttaagcagtccacccgcctcagcctcctaaagtgctgagattactgcaggcatgagccaccgtgccgagcccctatgcgagcgttttcaccattggaattggaagcgcttcactgtggactgttgagctctggcgtgcagggccctgtcctgctctgagctgagggtgtctgagtgccacagaggtgtgggtgagcacccaggctcctgggcccgctcctgtcgcagctcactttctgtcctctagagcaggcagcttatcttgctgtgagagacaattccttcctaagtccgtttctttaaactcagtaaaggttccacggtgattcttcctgtgcaactttgaaaacagcgatatcacatttcttgatggccgagaatgttgcctctacttttgcagcatattttactctgtcatctaacagtgctgggcacccatgctggcagccccagtgctaggggacccacgcccatgctcttgtgttatgcctgggccccctggggagcactgtcctggattcctgcctactggtcctctcggctgatgacggatggtgaaattgcagcccccaagtgaccttggtgccttctagctgagagagtcacggatctcagttgggaacacatggtgccaaggtgccatgggctggtttctgcaagttgtttgcaagtcctagaaatgacagtgacctgtaagcaagaagcttgggacctctatatgtcaggaagtgacatgtgcagtgctccctgggcattttctttgttccagagaagctggaacacctggcatcatgcagaacaccaacacgaggatatagtcaggaggacctcattctctgccccgtcgatgccgtggtgcgcatgattattattttgtttactggggaagaggcttcccctttgtgctgggcctgcctgctctggaattctcagaggagcctcatcattctgactatctctgagcgggagctacagtgggagtgggcaggctcctgggacctggacagggtgggaggctgtttcccacggtgcaggctggggccgactcctactaggcctggttgcacttgctctcacttgccatgggtttttagcacagtggtcccctcatgcacctgctgaggggcctctgcacactcacgggaggaagcctgtcctccagggctgcctgtccctgagtagaaatgcaactgtcagggtgcttaggatggtgtggtgtggcgggtgaaggtggacttgagtccataacctttgtagagcagacactgactcagcaataaaatgaggtgactgtttattaatggcaatttaagtccaggactgtcggcctctgccctttcatatgtgcgataaacttagcacggcgtggcgggctgcaggacggaatagtaaacaaagtgcgtggcggtatgcattttaagcttttcttttgatgggttctctgtgtactgtgtgtaggatgccccgggatatcagctttccctacccttgctgtaaacttgtgcatgagtgtgcgacactgctggatgtcacctgcgcgactctggtgcacccctcatagaggctgctctgaatgtggctccagagcttctctcatctcatttattattagagacataaaagtaatttagctgataggaaaatgtaattttttcttcatcatagcattagattaattgacggtgatgtgattatcccgagtaaatctacccagtgttatagaatgcccacagtgcttaggcgctatgttagcaccgcagttggaggcaaagatgaacaagacaatgcattgtgcctcaagtcacttacatatgttaactgacttttctaatttgtaccaaggtctatgaccataccaccctgaacacacctgatctcttctaatttgtaccaaggttacctgagggtactaacaccggtaggagctgtatgagtgcatcttgtccagggtttcacccccttgggagcagatggccattcggagctcagagaatctttgcctggccaaatggtgggcgtggacctggccagcttctgagaaagggagccaggagctgatagggcagtggaaccacctgtctgccttggagatattttcttcacagccctcaccattgcttttaatgacatatttgtgtgtttcttatactagggtctgtcccaccacgttcctgagggtaggacctaggtccctttgtattaattgttctaagaactccatgtttaagaaaccataattagtcagtttgacaaacggcacccccctgcccatttccacatcttcaaaactggaatttggtttataattgatcaggtcttacaactacaattgtttgtattttctttttctttcttgttggcacacaaaatatagtgtgttacaattactgtcaccttatattcaattatatatgaaatatgaagtccaggcacaatggctcatgcctgtaatctcagtactttgggaggccgagatgagaggatcacttgaggctgggagttcgagaccagcttgggcaacatggcgaaaccccgtctctacaaaaaatacacaatttagccaggtgtggtggtgcaggcctgtagtcccagctacttgggaagctgaggtgggaggatcacttgtgacttcaagtttgaggctgcagtgacccatgatcatgccactgcactccagtctggctgacagagtgagaccctgtctcaaaaaaaaaaaaaaaaaaaggtgagagagatagagtagtagggtgtgagccgtagaaaaccagtcaatagaaggcacacagctttttttttaaattttttttatttttatttttttggcgatgaagttttgttctgtcacccaggctagagtgcagtggcgtgatattggctcactgcaacctctgcctcctgggttcaagcaattctcctgcctcagcctcccgagtagctgggattacaggcacccgccaccacacctggctaatttttgttattttagtagagatggggtttcaccatcttggccaggctgatcttgaactcctgacctcgtgatccacccacctcagcctcccaaagtgctgggattacaggcaggcacacagcttattaatcgagcttccttttggcttggaagttaggatgccttttcttcttctctcccgtagctccttttttttctttctctttctcgtctttttcttccttctttttttgcttttagaaagtttgttgggttttgtaaatcccatacagtgaatatgggttactttttaagcaatggaaataagtttactgaagtgatgatgattacatcatttggctttgtgtgcacagggtgaaggtctctaagaacatcttactgagacttcagaggagctgtgtgatcctgcctttgtgtcacagcccacccctgacccccaaataggcctgcccatgaagagctgggttctgcctgttttccacattacctccgtgacatggtataatcacactgtttattgttttttgtttgtttgtttgttttttcactagggaagtaactggctagtttcataatacagatgagaccaggcctcatggcagtgagtgagtgattgaggagggcctggaaggggtgggtaggctgctgcctcccctcccagggaagggggagatgtgtgggggcccccttggggatcctgtgtaaaatgcttaattgccctctagggatctgtccttaactatagatgattcctcaccatattgtttgtggttaccctgcctatagattattaaataaccttgtctcttatttattgccattagacacaggaagactttaagctactgatagataggtcagactattaacctattgtatcttatgtgcaatttacattcttaaacatttctatcttcaacctgtatcttatttagtttctagaacatatgccaattttgtattatatctgacagcatgaacattctctaaactaattcttaatggactgtttcattcttagattagggacagcttgggccattcgcaagctggaggagaagagtttcagatgaattccagttagtacatgtagaagaattgaggaaaatagaaaatcaccatcagaacatcataataatgatgctgtaggtgagacctgatactgggtgctgaaattagtcaatgagaaaggagaaacaagatatttgaatagtctcaaagtgtctttccaagtataaatgtttattaattatgaaaagaaaatagtaggtttagagtgaaggaaactggcaaacactgagtgctcaaggtcaacatcagcaacaataaacatacccacacgtggtaccccagggcacgacgcactgagtgggcacactgcctctgtggtgttcttcccagtaatgcagaatcttattctaatcgtgataagacaccgcacagacccaaatcgaaggacgttctgcaaaacactggaccagcagttttcaaaagtgtcaaggctctgaaaggcaaggagggacttccgacctgacatggcatggggggcgctaaggagacgggacaaacacaccacaggctcctagatgggatcctgatggggggcgctaaggagacgggacaaacacaccacaggctcctagatgggatcctgggatagaagagggacattattcagaaaaactggtgaaattcaaataataataggagtatgccaatttaatttcttagttttgatgattgcactgcagctgtcagatgtaaacactggagaaggtgggttaaggagagtagacaggaactctagtgattttacaactcttcctcacatttaaaattatctcaaagtaagaagtttacagaaacctttatgggtatgtatacccttttaattgacattcagttttgctattgtttacacagtgaggcttaatctgcattaatggatggaaacatagcatataaggagtccaggatgacagataatggcctacactggactttgaaatatgttgtgtatacatttctcctccttcctcagatttgccttgtgattaggctaacaatctaagagataaggccaatcaggttagatgctggcaggaaattcataaaactgattatttcttgggaaactgaaagctctgtttgtaaaaggctagcttgatttcagtggatggctttttgttagtgggaagtggagattcagggcaaaatgcaggaatgggtttttagggtacagtggctgcccctccagttgaaggtccatggggtgcattctcatggccaccagagaagatggcagttagttattataagtatcaatacgggccaggtgcggtggcttacgcctataatcccagcactttgggagactgaggcgggtggattgcttgcatccaggagtttaagaccagcctgggcaacatagcaaaatcccgtctctactaaaaatacaaacatttagctgggtgttgtggcatgcacctgtattcccagctacttgggaagctgaggtaggaggatcacctgagtctgggaggtgaagtttgaagtgagctgagattgtgccactgcacttcaacctgggtgacagaaccagaccctgtctcaaaaaaaaaaaaaagaaagaaaaaaaagtgcctctatagagtcctaagagcaaaatcatcttttgttagtatgcttatctcatagttttgccgtaagtgcttaacaaatgcttgaacaaagcatttgctattagactaatatgttactacttccaagtattttacttggatactgatatggtttggctgtgtccttacccaaatctcatcttgaattgtagtttccataattcccacctgtcgtgagagggacccagttggaggtaattgaatcacagggatgagtctttcctatgctgttctcatgatagtgaataagtctcatgtgatctgatggttttataaagggcagttcccctgcacacgctctcttgcctgctaccaggtaagacgtgactttgctcctcatttgccttcagccatgattgtgaggcctccccagccatgtggaactgtgagtccattaaacctctttcctttataaattatccagtccctgttatgtctttattagcagtgtgagaacagaataatacagatacttttgttgaaattgccatcatgagacccaacccagtagtctgcacccaagttcttttttgtttctttgagacagagtcttactctgttttccaggctggagtgcagtggggcaatcatggctcactgtagccttgacctcctgggctcaagcagtcctcccaccccagcctcttgagtagctgattacaggtgcacatcaccaatgcccagctaattaaaaaaattgtttggtagagatagggtctcactatgttgcccaggctggtctcaaactcctggactcaagtgatcctcccacctcagcctcccaagtgttgagattacagggatgagccatcacgcctggcctgcactgagttctgaagttagtatttgctcagggcaattccctaactctttgacagtagtcagatcagtggcatgactttgcctcagttactgcattgtctgctacttcctcatatgtaatctctggccccatcacactgcctactattcctagagcatgacatgtcctttacacccagcctctgttctttccagctcttaaagtatccttatctttcttttctctctgaaaaatttctgctcattttcagcactcaggtcagctaatatctcccttataaagaagtattatcataaggttccatatttctctattataacatttaccatggtgtttctatttgaatgaatgagattcattcacttctctctcatccattcatatgatattgatcaagtgcctattatggactaggtacatgaggaactagagagacagcagtgaaggttcagacagggtccccgactttatgggcctccactccagcagggcaggtggactgaactagctatataattacggtggtgagaaaaggatttgtttacctgttagcatttctagattatgagctcttggagggcatggatttttgtcttccttgtttttgaagccccagtgtcttagaatagcacccggcagccagtaggcgctccgtaagtgaacgaatgaactgagcacttaatgtaccaatttgtacatgatcttatggacgatcactttgctcccagcagcttctcaaatttttattgatctatgaaccgagctgagaagttcatagttgaagactgtcctgagcttcctggatgcgctgcttccttctcctggtacgtagtaagggcagcgtgtgtgacctgacaggatcacagcaaggctgtgcatcagtcaggattcttcttgcaggcaacagccaccaccagcaggaagggctcctcttgagccttgctgtcttctcatgtttccagtgccacgtcaagcccaggatggtgctttgagtggagcttgggtcgcatgactgtgcttggctgtaaggaaggttggaatccagtgctgtgcttgtatctgcgttttctgttgcaaaggcactccctttcccacagacctatcaagtggggagggaaggaggtttcagtgcttggcaagaaatatcactgtacgtgttcactactcactgacatgtaattggtcaactgttcgtaaattccggctattttgtgtttaagctgatagagaattctgacaaagtaaatgtgagcttctgcggaagtttctatcacagtatttttaaacatgcatcaatatctttgtaaattgaattgctccgtttaacctcatctcatagtgtgatcaatcgaggcctcaggtctctgaccaggcacttgcagtaatttttcaagaacactgtatttgacagaaacagcctggtagaatgtgatttgggaaaagggataatgtcttcaattgagtacggaaattatgtctttaaacgtctgggaattctattcaatcattcagtcaactgtcaacatttactggatgtccagtgtttgcagtgacctaacgattgctgtgtagtgatttgcattctttagtaagtttttccaagaagttttatatcttctttctaggagagagtatggttgggctgggcggggtggcacacgcctgtaatctcagcgactgtgggaagctgaggcagaggagtgcttgagcccaggagtaggagtgcagcccatgcaacatagagaaactccagaaattaaaaaaaaaaaatttttttttaaatcactgggaaaagaaataattataagagagtacctgcgtttctacccatacccgaggttttcttgtttgtgatcattaaataagtggatggtgttgctctggtggtgtgctggacatattttctcaaaccagaggtgcactatagtccaccatgctttgttccaaaatttgtagtggaggtctacctcatgcctcgttttgtgccaggcacaaatgaaatccagagatgaacatcttggggtgcctgccttagcaggcaagactcttggttgaagggacagcaggtgggccttggggccaggcatccttgggagatgcctccatccccaccattgcttggctttgttgctttgggcaagtcacatgacctcttggagcccgtttcatccttgtaggatggggttactgatacccacctcattgcactaagtgggccagtgaatgtacagttcagtaccttcctcatgcagttggcatctctattgtcactgtcacttagaggccagaggacaggcaggacccagacactggagtgcatttgatgccaggctgtggaatttgaattttacaaagaggagtcatgtttccatttactaattacacgattaactggagaatatgctaaagtcccccattgtcacaaattacagtttctttcttacttttgcatttctgtgtttgctgcagcccagcaggaggtccattaaaccaaaaggactcattatctcctcaggacagggatggtgagggaggaggctggcttgcagacacctgcccttgctgtcctcagcaggaaagggtggggagctcgagaaggagaagcccacacgcccttctgtccttggactgtgtagaccttcttagggtggcttcattatttgccaggcagtaaactccctgattatcagacacatctgtatgccaagcgaagtattaaaacagactctttgcaaagcctatggaagtgttttttgggcaaccactcttggtactgttttcatgcatgaccttggataattgacatttgtctgtggttcaaactggagatgtccagtgcttacagatacctaaagattgctgtgtagtaatttgcattctttagtaagtttttccaagaagttttatatcttctttctgtgagagtacagctgggctgggcagtgtggtccatgcctgtaatctcagctactctgggaggctggttgtgggggcatctgttgcctggaggtctctggaataatacaacacagggccctgagccccagaaatgctggcttattcctcttgagtttcctcctcagttaagggattattcaggtttccaaaacacacagtctcttatgacctgagaaaggtctctcatttgcatttgctcattacggtgggtaatagactggaagtatgacctttctccagttaacgacccttccccacagacgaggcttgcgtgcctgtgtctatagcacatagtgcgcctgagctgatgatgtggctcttctgaacagctgcggtggcagccctgaggccaaggccccggctactctagggtgggtgtggggtgggaggtgtgctttcccaccaaaggaagtctggttgtataggcagacttgtctccccggtggttagggctgtctgaggagctgctcttgtttccaagagtttcaggtacgtagtgtactgaggggagcccccaggattaatacacaaagtggatgacacctccaggttactagagaggcaaacctcacccccccaggacggtcccttgcaaacccttgcagtccgccatatccatctttcccactggattccagttctccaaggaaaagccagggcctggagccagggccacgctgcccggtgtcccagcccagcaggcatcagggtgggtggggagcctgggctgcccggaggggtgctccctctatgcccttgtaccccacgtggctccttctttgaagctgtgtctcagtcccaggggagagccttccaggatggaggttgagaggaggggaacgtgcatggctctgtcttcatctctgcggtgacttgcgtcgtaggagagctttggtgtgggctgtgctggccagtcatcacagtgccctgcagggcgcagggctgagggcaggctgaccagaccttccatgaagagatcgggctggcggggacactggagtcctcactctgctgagtccagctctgccacacgtgggctattctgagctatggcgagtcatcatcctcagtttccctttggcgaagtgggcccagtgatgcccaggagcaccttttgagggttgagtgtgcagctttaaatgcgaatgcccacgattctgtgttctccagccaagtgtggggtacccagacctcttccagttcttgcccttcttttaagtggtttgcatgagatcctccaagcactgtcactttttgaaaccctggcttttgtttccagtttccttttccaacaataacaggaactttgtgtttagtggttggtggttccaccttcacttaatgggttcgtcatctctctgggcatgtgagcagggctcgggatcacgtctctgctatagagacacacggtgaaaacaggcttcagcagagaaccaccgtttgaattatatgatggcttaaagaaagctctgtgtctacttctgacatctgtgtttcttggtatgatgctggcaccttaaaacatttttgcccgtgtctagtaatataggaattcattcactcatttatttattcaacaaaattttctttgctatttgcaaaaatgttatttgctatagcaaataaaagctatgctctatgcaatggaagaacacaggtatgaactatacaagattaattcctttacaaaactcttaataaagggaaaaacacttatgaaaatagaaggtatcattaataattatagcatacacttacataatactctctgtgccacactattcttggtgctttctatttatattatttcaattaatcctcatagcaacgtgtgaggtaggtactatttctgtctcctttttatagctaagggaactgaaccacagacaggttaagtggcttgcgcaagattgcacagccagtaagtagtagagccagcttcgaaatccaggcactcttgcagcagtatccactcttaatcacctgtgctacactgccttggaaagcagttgttacattagaaaagtgaaggcagataatcctgtggggaatggcttgtagcttgagaggttccagagttcacatctcactgtagtagggatacacccagccaaagtctgaaagttagaaaaattattttaagaagtatgtttgcataagttgattccttctctttcaggtttatctgccataattcataaggctcatacaaaaattcaatgcgaaagttaggtcttaaggaaaaccacgtgatttgtttcactttggtgcggtggtctaaacctctctatttatttgccagtagaacaatgctttattagtttgctgtttttctttttttttttttttgagacagagtctcactctgtcacccaggctggagtgcagtggcgcgatctcggctcactgcaagctctgcctcccgggttcacgccattctcctgcctcagccttccaagtagctgggactacaggcgcccgccaccacacctggctaatttttttgtattttttagtagagacggggtttcaccgtgttagccaggatggtctcgatctcctgacctagtgatccgcccatctcggcctcccaaagtgctgggattacaggcgtgagccaccacgcccagccagtttgctgtttttcaaactacataatcatgctcccttacagtggcctggagatgtcagtattcctttttgctcaatcagtttattgtaggtaaatgtgtgtgtgtgttgtgtgtgtgtgtggtttgtgtgtgtgtgtttctttttatctaccttctttgctatatacattttgccatatgaaaaccctggtaaccactgggcacaggtttctattggtagacaccacttatccacggaggaagtgaggacccggaggtgggaggcttccccagcaacatggctcacatctcgtttaaggtgctgacagtgctggaggctgggctgtttaaggtgctcagcagcactgcacccgcactgagccctggagctcccgctccccacccgccctctgaggccctcccaggctggctcctttctccctctgtagcttcctcctcaattaggctctcttccaactcccaactcaaccctggttgtgccagaagtgaactcctctgtaccccctccacctgggcagggctctacactgccaccccttctggtcacctgccttcagggcctggctgggcgccatccttatagggagcctctcatggttccagggacccaaagtcctttgatctgcctcgcccctgagacttgcaagttcataccatggggtctggcctgaggcaagcctcttccgggtcgttcttcctgcctgatggacccttaaagctgcatctcctgttgctgccctgaagactctggttgtgttttctgtgtctccggcctcgctgctgttggcttctgggtctttattccattgcaggccctgttgctgtagacagcccttgggttttatgtgttcaactttcgaccaacctgcactttggcacattgcatgttgtgacacataaaccatttttggtgtgctaagttcaaagttttgaacaacagctgatgaacaaatattttgagctatgatttgctggcactgcttgcaagtttggtttctgaagcatttatttattcagtctacattcattccaaaatatttgcaagtgcctatggagatccaagcattgctccagagaatagaagctaagccgccacacctggttcccacccttgggaagctttcagcccagcctcacctcctttaaaatctttgtgcattagggactgaaaaccaggaaatagagattttatataaatgaatacatagatgattgaatttagtggtggcttgattctaggacacagaatacttcatgtacttttatcaccaatgatgaaaacttgcggtgagtgcttcaattggaatgtatttgcttggctttacaaatgaccttagggctatatttatagaatcattaagggtctgaaggagttccttaaatttttagttatactttgctgcattttattgggaacattatttgctataatggcatctatgcagttggggatccacataggttttgggacaaggacatctgtacgtagacatctacaacccagaggtatgctcgttaatgttaatttttgtgtcattttacaacatattgtgccatataaatgatcatccaaaaaaggaagcaataaatttggaagtcatcaagccatagttttggatcatgattaggtccaaacttttgcagacctgatacctatcttggagatttttattttttttattttttagagacaatcttgctcctttgcccaggctacaggaggctggggtgcagtggtacaatcatagctcaccacaacctatctgagagtcttttaagttctttacgtgaatgatttaattttattgttaaaatatccacacaaatagagactgttaatatctgccgtttataggtatccaaactgtgacccagaaaggttaagtcactttcccaagatcacacaggtaataagtagttgcaccaggattcaaacccggcagtcttattctagtgccaccatgttatagcctctcccttctttgcacctgaaatttctcagctctaaaataagggaattggtttatataacctttagggtctcttccagcctaacattatgtggtctctgacgtattagctggtagaagactggatgtaccctcacgtgcacatgttcacacacacctccacagacacagacgtgagcctggtggacctcccggaaggcgtgcagcaggaataaatcatgccaagagctatgggtgaggagaggacctcggcaccattctgcaggcactttcaggggagcaacacctgtgtcttgttaactggctactacattttgtgatttataatggaaaaaagtgacacctacaatactgagaacctttttaaaaggggggttctcaggacacagcctagcagagcacagaatgtcttcacatctccatttttcacaaaaataaagcacacgggccttaattgaagatgagcttcatgaaagcatatctgaggttggtggcagattgtggaaaactgacaaagcattgctttctttattataaacaaataatcaacaaatacaaatagtggattatgaattagaaattgcttgtgttagattgtccagaatatcaaacactacattgatgctgttgctcctgaaacatcactcttaagataagcaacaagggtgagattataaggaggaaattacataatcatagaaaataaaataacatcgccaccaataaaagatgccagcactaaataacagcccctgtctagccctgtctctgccaagccccactctgagcgttctgtgggcattatctccctgcatggcctctggaaggaatcttactgccattttaagcataaggaaaacacagcttaaatatgtggcccagtctagcatttattttgtagtggaatcagggtttaaactggagaccctcagtactgaaccctactgtttatcctgctggaagaagttcacggtgaaactttactcaggctttggggcccaagtgcagaccttccatgcatgggcagagaacaaagtggtccctggtcagccctgaatccctgcttcctgggcttcacagagggtaacaaatgaccacagaatactcacttcagaacggtcgcgacactgcagaagactttagtcccattcactggtgctggaaggcacctcaggactcagcatctcagtgcacagggagcctagggtagcttggggtgacttagttcagcaaggtgccctcatgcaagaagccgcccagctgtggtaatgggatggggaagcctctaagtctcctttttgtacagagaaaggcacgccagggacgctgagcaaaatagtcacggctccttaaaagcagggagaacatccttccgcgctgagcactgcacaccctcttctgcagtctctgcgagggagagccctgcagggcggatgtccaccaggctgccggttccagcccttgctgcccgtgtaggggtgtccatgggcgcttggttctgggcctgtgtgggaatagttttgtatagtttgactcttatttccagatcattcgtgtcctgggctgtgtgggagccagtggtaggcaaggggtgtggaattaggaggcctacctggcttccacccctctccctgggtctgtggaggctgcagctccatcaggccatcacccgctcactgcagctgggtgtgccaggcaaggaggtgagcatgcagggtggcctcccagccctcccccaggtgacctgtgctcatttccgtttctgagtccccacttcctcctctaaggtcatggcaaagagccctggcggctgctgcatccagtcccatccctgccctgcctgggagtcctcagggttccctgagtctccctaggcatctggtagccgagaatagaagcttctggccttcacgcgtcagaaggcacccgtggctgccccttacttctgcctcccagcgttttgtagacattcttctcctgagttccccctgccccccacccaccgccctgttgtttccctaagtgccgtttgtagaattaaaagataccgtggacacttagaggaggcagaaatacaggtattcctacaaactgggtcccctgcaggaaaaaacgtgcccttcagagtgccagaaagctagcctgggggacgggcctggggctggggtgggcaggagtcctcgctgcacctgcagccttggggcccctgccgtgcctatgctgcagtcactgactccttagacctgtgcctagtctcctactgaagggctaccccatgcttctgatgctcattacacaccagttacggaactcccccggggaggagctctgtttcaaatacgttaatttctgttgtgaggggtcagttaccgtttatctaagtattactgaattaatagcaatttttggccaatatgtgtttctcggattcattccattattgtgccattcctttggtcactgaacattcatgattatggagcaagaagctcagtgcacatgtcacatgggcttacactgtgggaggtcagagctgcaggggagactagacagagagaagactagaagactagacagagagagatggtgatgtgagcttcagccccaaatccggagaaatactctgtctagcctaaataaggcttagtcattgccacttgcaaataaagagagatattcctgcaaatatatgcttgttaaaaaccagtaaggccaggtgcagttgctcatgcctataatcctagcactttgggaggtgaaggtgggaggatcacttgaggccaggagttcaagaccagcctaggtaacatattgagacccccatctctaccaaaaaaaaaaaaaaaggccaagtgtgatggcctgtgcctgtagtcccagctactcgggaggctgaggcgggaggatggcttgagcccaggtgttggaggctgcagtgagccacgatcacatcactacactccagcctgggtggcagagtgagactctgtctcaaaaaacaaaaccaaaccaacaccatcaccaaatttaaaactatactttctgctttctgtttatctctctgcatatctccagcaacagatctgttttttcctcttctgtctcagcaagccttgctccagccttcatagtgccatgtgctgtgccaggctgtgggctgtagctgcttgccgctcaaccttggtgacatgctctccaactagcagaggcggaaagctggtgttgggaaggagtgtggcactggagctggtagcaactccctggggagtctagcaggctctgggttaatcctggcagtcctctcaggctgggcacaacttagcctgcattgagcctgggtgaatgaatgcctgccacaccactggtgtccagaagcctttactgtatttccttaatattgatgtaatcatgatgagccaccacttctagaaaactctgaacatttttggcctttaagggaacaagtttctaattttaagactaaagaaggccgggcttggtggcttggcagggcgtggtggctcatgcctgtaatcccagcactttgggaggctgaggagggcagatcacctgagtttgggagtttgagaccagcctggccaacatggagaaactctgtctctactaaaaatacaaaaattagccaggcatggtggcgggctcctgtaatcctagctacttaggaagctgaggcaagagaatctcttgaacccgggaggcagaggttgcagtaaaccaagattgcgccattgcactccaacctgggtgacagagcgagactctgtctcaaaaaaaaaaaaagactaaagaagaaccccatttactacatttctcactgtgctgtgtcttgagcatcttccagtaccgtacctgggagggctgagtccacgaggcgctcgtgctcactcactctccatttgtgcttctagctgctgacctctggagtgaatttttctgcagaaatccttggctgctccccatgtgtgcacctgaagagttatagaaagccctgttcacgtttctttcacacatgtcctttatgtcatgggcaacctgtgttcattgaaattttatgatttctttgtatcacgtgtgtataattttcactgtacaagaaacttatatacttaaaacatcttccagtgttaggcctggtgcgatggctcatgcgtgtaatcccagcactttgggagacgaaggcaggtggatctcctgaggtcaggagtttgagactagcctgaccaatatgatgaaaccctgtctctactaaaaatacaaaaatcagccgggcgtggtggcatgtgcctgtaatcctagctactcaggaggctgagacaggagaatcacttgaacctgggaggtagaggttgcaatgagccaagattgcaccattgcactccagcctgggcgacgagagtgaaactccatctcaaagaaaaaaaagaaagaaaaaaaaaaacttccagtgttttattggctactgatttggacacttagtggagagaggcagaaatgctggtttgtgtgatttatacagctgtaatatttaatggctttacacgactaatgggccctctggttcaaggtgaaaccagaggagcaaagtgtgtgctgattcttgtccatcttcttctttagcttgtgtgtctgtgtggacgtctgtgacaggagcacagatatcaggtacaagtgaaagaaacaaaactcagccccaaagtgcactgacttctcttttcccctccctttagcgcatttgagtccatttaagttgaagcaactattagccacctactgtgctggcccctggggatgcaaagataatgacgtgggtgagcaaagagacaagcaatgacagcaaggtgattagcactgtgttgggggatgcgcgggttgccatgggaacatggaagcggtggtactcagttcctggatggggatgggaatactggagaaggcttcacagtcttggcgaagggtttttctgtttttgttttttgctaaaaggtcagtaggcatttgtcacgcaagggaatgaggagcaagtcattctaggcaggaggaaccgtgtacatgaaggtgcagtgatgggaagccatggtatgcctgagaggcattttggcctccagggggatgtgtaggatttaggaaagactcaggaagatgctcgggaccacatggcgaagggcacgtatgcctcgctaatacggactatgtcctggaagtgatggaatctatggaaagatttgaggtcgaggagtgacatgacatttatcatccagagataacagtttgcttaatagaataaactttcattcattcagcaaatatttttgagactgtattacatgccagaaactgttctgggacccagggaaataacaaataaacaatactgtgaacattccttgtattcaggagaacttacattctagcgattgaaggcagtaaatacaataaaagttaattatatgatttattgattcatttgtttttgcttcatttaaaggtggtaagccttataggaaaaaataaggcaaggaacatagtcctggacctgggtgtggagaaggccccatttatcaataggtagctttgttatacttaaatataaagaaaacttgctttcatttatatttttatgaatttactttcagtgtgcattttgggactaagcttctgggttacatttgtctcatttatgccaattattcttgctgttttatgcacttttccacagagatagtattgagaaaacctggattggctgtggagcagaattaaagctcagctgtcagcctactggggcacttcctccctccaggaaggtggaggaatatgacacgtcggggctccagatgagagctgtgttcagaggaggaagtggtttttccaggtagatgtggccatcccttctctctttaatgatgacagaatgggacagagcagagctggcctcagcaggagcgttcaggctggagtgaggaccagcgtgagttttccgtgctggggttgacggcctggggaggcagctgcattgttctcatcctgtgcttcccgaggtcgaggctctgacaccatcctgctcttcatctgactgacttgggtccagcgatggcatcagtgaatgagtctgtgggcggggcctgggtggtgtttgaggtttgtctgtttggagaaggggtggggacagaagggaggctggggtgaggggtgagggtgattcatacctgtgagagggaggctgagattccccgagggcaggacggtggaccacagtgaccctgtgggaagaggtctggggacggatggcccatggcggcagggtgcgcagagctcctgggtgctgggccatcaggccacactgcacaggtgaaaccggctctcaacaggacatgccctcggggaagaactgaacagaaagacagatttgttgttaattttggaaggtaggggattttatcagccagtgttccattgaggataatgggttttaagcccctgctcctgtttgttgaccacgttattttgaagtctcccaagtctactagaaatattctctttttggttactggggagatagacaaaggaatttaggaaatccttaactggcacttagtactataaagaagttctttatgaaaggtctgaaatgggcatgttcagtcaaaaaatattttgtctttgcagagcttggaattctggcctggcataggttgtcagaaataagtagtttttcctaataaagctgtaactttcagggcaggtgagaggttcccatctctctgcccagtagcggggctggttctaggtcagcctggagctcagcctcctgctgagaacccaacagccccacccgtgcctcttcctactgcagcttggtgtacaggggagtgcacgcaatagcttgccacccactttgatcccagccttgagtgttatcagttacaggagccaaaagccattcttttaagtaccaagtctccatctgggaaggaagagacagtttagttcaccagcagaccttccttgtttggggcctgggacattctcctgcagtagaacatcctgccatccataaaagaggtatgaagatgccatcacaaaattctggtgtgggttggttgaagaatacagggaacatgggtgtttatgtagcccacgccctatgaggtcagtgaggtttgagatctcagaaggaaggccaggtgcagtggctcacgcctgtaatcccagcactttgggaggctgaggcgggcggatcacgaagttagcagattgagaccatcctggccaacatggtgaaaccccgtctctactaaaatacaaaaaaaatgagccaggcgtggtggtgcacacctgtagtcccagctactcgggaggctgaggcaggggaatcgcttgaacccaggaggcggagattgcagtgagccgagattgcgccactgcactccagcctggcaacagagcaagactccttctcaataaataaataaacaaacaaataaataaataaaacaaaaggaaagaaaagaaaagaaaaaagatctcagaaggaagacgttttcaaatttcataaagttgggaaggattctaggcagatgccatgagaagctcaaggcaagaaagtcaggcagtttttacccaagtgggaaaaaaatagcaagctgtgacccacctgagggcaaggctgggggcagccgggcagccatacatgggctggtggagtcttgacttatccctggctctgagctggttgcagatattaagaaataagacaggtggagaaatcagcactcacacccagttctcagggtgccggaggctggaagggaaggagctggctgtttcctgaatcaacagtccagggcttcagccagacaatggattttctctccaaaacacacagtgttgtgctgagagagaacattgtgatttaggagcacagccagatgactgggtagggacagatggaaaaagcctagctatttatgaccttgaggacaggagagaacgattccataattgaagaccacaggtaactaaaaaaaccatgtggccagtaactttaactaattctgcctttaaaaatctttcacaatttgctaataatatattatttccttcttttatctccttcctgcctcattttccatatatttatttctagtgaggatatttactcagctagagaaaattttcttcacccaaagggacacccatagttaactgtggttcctataagaacctctccacaggcttttacatctattcattgatttctttaataatattgattgattgcttacagtaataatactgattgattgctggccatgtaccacactctggggactcattagtaagaccaggcagacataaatccctgccctcatgtagtttatgctctaatggagaaaagaagacaagaaatatgatgtgtatatttgactatcatgttagatggaaatatgagtaggagagaagagtgaagcaggaaaggaggtaggaggagccgggagtctgggaggtgagatggggagtggagtgagggaggccacggcgatggtgatgtttgcacgaaggcctgatgaaagtgagggagttggctgagcaggggtctcaggaaagctctgggcagaggagcagcaggtatggatgagccctgtgtgcagggagcagcgaggaggccaggcatccagagccaacctcgggagggcaaggggaggctggagagctggtgggagccacatcagggagggtcatgtcaagttcattatgaggacttgggttttcactctgagtaaaatgaaagctgttggagagacctgatctgacttccatctcagcaggaacatcctgactgctctcttatgagtaaaccgtggtggaaggacaggggaggagctaggagatcaccatggggaggggagattgtaccttggaggagggtgactgtagtgaggtggtgggaaggggtccatttccagtgggttttggaggtggagccaacagagtgtgtggatgggttgggatgtaagggaaaggaaggggttatggatgactgcagtggcatctctatccccagtgcagtttctgagatagggaaagctactgggggagtgactttgggtgggaaaatgaggtatttggccttggacatagtaagctgagatgtctattatacattccacaaggatatgttgaacaagtgactggaggagtctggggtctagggcaaggtggaaaggtcagggataaatgtgggaattgttagtgtgagacagtgactgctagagatggcaaaggaatggtgtatgcagaaaagagaatggagccaagggtgagctggagcactccaaggttaagaggtcagggagtggaggaggagctgagaggtgtggagaggagtgcagtgccatgtgcgtcgggacatgggaaggatgcggttccctgtgggagggagcagaggtgtcaactggggtctggtgagatgaggccaagttaaccacatgggggtctccagggacctggccaggcggtgttggtgcagtgatgggccccaaagcctgattcggatttgtttaggggagaatcagaaattagacacagtgagtacagaaaacttgtttgcagcattaaactgtgggagcagagaaatgggccatggggcccagagcatctttttataagaccagaagttagagcatgttggccttctcgtgggaatggccgtgtggagctgttgttgatataatcagtgtgtgtcaaaatgtccagaattcaggaatccatttttaaagttacctgtcatttgaatgttcattggaataattcagagcaggcgacggaagtaccaaagaactaatgtgggattttatttttcaaaatccctgtcttaaaaatttatagaatcactgatcataagaatcgaaggacttttagaacataagacttttaggtgtgagaacgcaaagaggctttcaggcctttcagccaggggatgcccttgttcagtgaaccctccaagggaagcctcccctgcatgcagacctgagccagcgctcagggttcctgacgcagctcccgcttctgccgcaggtcgcgaggccccacagggagcactgaagttgttcagaggaaaaatgaaaagctgctggtgtagtccaggcacctcactttatcataggaatctagagataaagagttgcctgaggatacacagaatattgagtgtaagagctggaaggaggccggtatcctgggtcctgggtctcggggcggtggactgtccacttctcccttgctgcctgtggccgtgctccttgcccaggcagtgacgggctcttggtgggtggatgcatgaatgaatgagggactgaccagagggaaagagcctcccggcccagccttcaccacacctgaggataaatgctgccaggcactcttgtgcttcccattttggggcccacgtttctgctgtcaacacctgtgcatctgcctctgttgatactgccaggtggatatggtcctcatcacccacagacctccaatacacatggaaagcacatctgtcagtgggcgacgtggagctcctgttgcgcttcatgattgatgctgctttctctgcagagcaaaatcacgagaaggttatgcgaggttagtcccgatgagggtgtattaaaagctcggcacagttgactttccatcactttcactaagtttatttaaaccctgcagattgagagctgtgaatgggcctcagcaaggcatacaaggctcttcacaatgggatgccttggcgcccaaagtctacctaccacgttgtacacagtgagatcccggaacaagcaagttagggcccccagaggtgcctttctgtgtcttgatcagggtgctggttacttgggtgtttttcggtctgcatagactcattgagctggactttctgatacacacacacatgcatacatacacatatgctgtatttcaatcaaatattttttgaaaaaatgaagtatatttgtccttgaattcaaaatcctttaatgcctctggtctcacacaaagtaaaagccacaggttgtccagaggcctgcaggctccctaggccccccagccccctcgctgacgtcaccttctccgctgccctccaggatgtgtccctgctgagcaggacccctgccactccatgctgatggaggagctcagtacacatttctcgaaaggaaaggaaatgtgtctgaagtaccattgatcctcatgaagaaggactcatgtgtcaggatttctgtttagatgatgccatagggaattaggtactttattagtgcctttaaaattatgaattttaatggctttagagttctatagacatttggttttcagagattttccctgttaaaataggatttttattgtgcctgattataaaatcatatataaaatccacaagaaacttgaaagttattaaagtgaccccagcatcctcagagaaagccactgttgatatatgggtgacgtcgtttcaaactcttctcccatgtccattgcacttattgatatttctgttcttccaagagtttgaaagggggttcttacctactttcggtactgttctatgtaagaagtgaggaagaatgcctcctcgcatcttacagacagaaaaccacaaaagcaaattcattcattcattggttataaacatagacgggaatcactgttatccaccctttcaagccctgaaggacttttatgactttaaaatgccaggtggtgttttgatggaaagttgggtgatttgttcaagctgctctgaagggtaattgcaggtctgtaagtccgaagcctgagagtactttggacttttaagagcacgttgttgcatgtttcacttatggttctcatagaatttgagacccattaaaatcatcttttcagcaccataatgggagcgacaaaccatatcataaaatggattgagtttttaaacattttttattactctctttgacgggaggctcttctctggtaatcttattacttgggcagatttccttttatcatgtcatattcatctttctgaaggacaactatggtttcagcagcaccacttaagataggacttttattaaatgctttggggttaacttaattcattaacacagaatataaaccttcaaagtaaattccactttgttccaagtttatgaacgggaatgtcagcccgtctttgagtgaggtcagagcgtcaccagtgaggccggtgcctttacgccgaggttggctgagcgtggagctggcctgtgacaccaggtgaggcatgagcactgctgcattctcctccctcaggttcccagagggattcacgttgataacacgccggtgcagtctcgcagcctactcaacatgtgcaccttgcactgcaggtttccccaggggagtgagtgcgtgcatcatccccacggcattcccatgctgtcagttcccatgctgtcaaaagctgacgtttaagaagaatcgccctaaggatcgacttttcatttctgaaaactctcaaagctttatcttcataattagctaaagcactactttctggatgctgtgttttggcaactttgtggaaaccactttatggaatcgaatatttcaacctccctgaaggctgatttaggaaattacaagatggggagtccttttccctttttgataaaattggtgtctaggatagcctcctccttgctgaacagcaccctttaataaaaagagtgacagatcctgttaagttttagaagcaggagagtggctgtttctggttgattggaatgcctgcccaagggccagtgaggtcccatgaccatgcctttggtttcctcttggctgtggtggcttgtttggttggaattcggtttagagatgagttctttgcagtcagttttcctctcctctttcctctgcatttcctgatttatgttttgtgttttactcattattttccatcttcactgaattttacttctatttatttatttaagagacagggtctggctctgttgcccaggctggagtgcagtggcgtgatctcggctcactgcagcctcaaactcctaggctcaagccatcctctcacctcagcctcccaagtagctgagactataggcacatgccaccaagctcagctaattttttaattttttgtagagatggggtctcaccatgttgaccaagctggtcttgaactcctggcctcaagctatcctcctgtcttggttgcccaaagttctgggattacaggtgtgaaccactatgcccagcctgaattttccttttattataggatatcttacaccttgcaggggaacaggcagtgagtatataaattaataaaacattgttgtcacctctgtactaggaaatgtaaacttacattgtttatggtaatttatgctaatcttagaacccattaattcttggcttacacgtcactggcagctagatttgacctctttgctatttacaatgtaagtacatggaaaaggcacccgtacagagagcaggttctagactttaatgtcagaaatgatggagccagaatcactctccattttcaggtttgtgaatgatagaagtgtgaactaaatgagtcagtgttgctatatgaattttaacagaaataactaatgtagactactttgccaattcacaaaaaaggctgattttacagctgagatgtaatgctgtatataggtccttattttgtgactgagatcgtatctgtgaaaactaaggctttaaaggagtgtaggggaaattgaaaacaactttttgttgcctgttaactagtagaatgttgactctaccaagcagattaaatttagtctctgtgaggcttgatttgtcctgcttaagattgagcatttatcattgcatcctgaccgagtttaggtttacattattcaaatttgttaagctactggtccttaaaattttttttaacatagcctttttgtatataagtttggaattcacagaaaaccttaagatattccatttcccccctagttttagggctcctaaaattccctgttttttcaaaggttataaaatattaggacattccctttctctgaatcattcttttcctttctcctctcgcacatggtataacccaactggctgatgttagtttgtacacaactagaatgaccttcaggacaaaaaagggtttcctctcgatccgatggaaatctcgggttttatgttccactacaggtaatttgttctccagcttcgggtaagtcaggcattatccctggcctgcttcctcacctgggaggtgaggggtggatcagtgtgtctaggtccctctcagcattaagatttgatgactctgggataactccacaacacagaaaaacccatcagaagctttatgtagaaatgcagagaagctgaataccctaaatgtggagaagattgtgttattaccagaagtgtttacagcgattctaaagtctgttgttgactctggaagttgtttctcctaagttttttttttttttaataagaaatcaaataggaaattttggcaaagaggaatgccactttcttcacttagaagggcatgacttttttttaagaagaggagtgatttaaatcttataggttataatacgtctatagctcctggaggagacactggttcctgagcaactcattctgtattccagtccagtattatacatctgaggttgccatgaatttgtcaccaaaatgtttctaatgtttaacaatccatgatttccctcaacttctagcttggcagaaatactcaacaagttccacaaagaatagacaacatatttttaaaaattttccattgtctttctctgacttgagttttacttcatggaggaccctctctggttctagtctgtcaaagtgtagtttaggggtcaaaactacattggttccaaagtttcccaaatagcccattgacagaacagagctctagcgactgggccctgtagtcagcaattatccaaatacctgcttattttaagagattgtattttagttttcttctttgtaaattagcaaataccaaataaacattccaataaaataccattaactaaagaggaggcttgctgtatgtgagctacctctttctcagtagacagtggttctccatctgcgctgcccattggagccaggccagagggtgccagaaaacccacgctgtctgactgcacctcaggccagtgagataggacctgtctgggactctgaccccagcagtgctgaaagacgtccaggtgatcccaatatgcagctaagaggagggcctttctcctagggttatcagtttgtttgaaatatcacaataatctcgtgattagaggacctgaatgcactgggcttttgggtggcacagtgtgctggggacagcctgtccggagttgggatggaggtggaagcctgcctctgtcaacaccagttttgttaagttggacagatatttactgtgctctgcagttctcattccagctttagcattaattcttagcacttaatcacattacagcaattttctagtattttctatatcacatcaagaagccaataaattaaaattctcaatctggtcattctgattccagtggccatgtgatggaaagaccttactctgatattgggctaatgactcactgctgagatttagattttataaatttgattttttttaatttttaattttttagagactggatcttgctctgtcacctgggcttgggagcagtagcatgatcatagctcactgcagcctggaacttctgggcacaaacgatcctcttgccttagcttcctgagtagctgggagtacaggagtgtgccactgcacttggctaatttttaaacttttttgtagagacagggtctcgctttgttgcccaggctgctctagaactcctggactcaaatgatcctcctgcctctgcctcccaagtgtggagagtgtaggtatgagtcactgtacccagctgaatttgaaatttaataggttgatgttgtttccgttatctaagaagtaagagccaagcacattagtagcacaagccttgttagtgtttcctgagtaaggttgagcctacttaagacaacaagtgatttggggaactttgttatgcatggggccatgcccattacaagtgagtctctcacattccttaaagtggatttggaaactgaggcagtgctatgagatgaggcaaaatggaataaaatgggaagaataatatctgctctaattatttcacagggttcttatgaggctcagatcaaattattcatttattcaacaaatgtgtgattcaccgagtgcctgtcacaggctgggcggccctctagattatgaaggagataaagaagggaaatgtttggccttggaaggagcagcaaattagtcactgctcatatttttaaaatagttcatgtcataagctctttgaagagggctagctcattcacttccgagtttccatgtctcagtacctagcacagaacatagaagcggctaatatattggttatatgaacgaatgaatgagccacagaattcatttccttgcaagcatgtcgtgtctccccccaacaagttaaaattagtgaagtgtggatgtggtttcatttcttgggtagtttaatgttccacaccaacttgaatatggtagtctaaccttggatcctttcaaaccacagcaatggtgaactttttagttaagagtttgattcaattcagattagtattcctttttcccaatcactgttttagcaacacagggagtacctgttttcggttaatgcgcttttcatgtttggtataaatccatagtccaatatttcttttggaaaggaagataaatttttcccttgacatcccttttttccattaagttaaaaaaatgttacttagtaaatgtgatttcaaacagctgggttttaatctttccaccttatggaaagagagcgtttggctccagcagcacccccaccacgtggcccagcctcactctgcacacagattttctaacctggatggcgccgctagcgaggcgcttgtgggtgtgcatttgggctgtgttcacatgttattctaaactaggtcagcagctcggctggtttctttttctatactcttttaggagaatgtgaacaaatggaggattataatacgctttttatacaggttcacaaaaatactttgaggactcttaagttgtgtttctttacaacaggtgaaggttattgtcttgcgggccacagttcgccgctgagaggcaggctgggctctcatggggtagccccacacatggttagcatcgctggaagaggccttggtgtgccgatgcccagccttttatttgaatgattgaaaatctgagttgaaaggaccttggacttgatccaggcctgccacccttattccagacagacagaaccaaggcctggaaaaaggaagaggctgtgacagtcagtggcggtgaggaacccgggactcctccagagactctgtcttcccgctgtgtactgagtgggccgtgctgtgtgaatcctgccagcttctgtggtttcctagggccaagcccacactcagaatgcaggatgacagtcactgtaagatgtaatggacctttctgtgctcaagtgtatataattgtgtaacttcctttattcttcattgcttaaatggatagtaatgtgttaagtgtgcaaatttattttaaagtcctacaaaactgaattccattttcaaatattgattcgtacagactttagggagcctgtgttcagtgtggcctataaggatttgggtatgggacctgccctatttttatagttcaccagcatggccctttagcagaaagcacacatgattttcccatgttttacattgtaaattcactgctacccatgcctggtattatgcctgatttttcttaggcatgagaggaatgaacatcagagaggtgaaatatgttgtccagattctcaccacaggacagtggcaagtgggagataaaatgtctgagtgttcttttgttaagccagcgctcctgagttctgatggcccctgccacggctggctgcacgggctcccccattctcggaagtgtggagaactgccaaggatgttttcaaaccgaataatagagccccacagctatgacttttgcagagcaggttgtggaaagaaagagagcacctgtgctactgtgtgggcagtgccgtagagtgaggcgtgcaaggtgggcctcggtgcccctgtggagtgcaggagggcaccatcctgtgtgtttcagacgaggaaggtccttacccagatggcccttctctgagtttagtgtcctgggctctccagatagtctgagctcccaaacaatcatggcatgcaaatgggggaaagaaaaaccaacgacagtcacagctcaagagcaccaagcttgcattgactgctccatgctttatattgtactttttcagagtgcaaattcacctgcaccagtggtaaatgcttgtatcttggttcgctggtctgtaaccaacagaacgactgtggggacaacagtgacgaagagaactgtctcctggtgaccgagcacccgcctccgggcatcttcaactgtaagtctctcctcccacctgggtggcactgtctgatgtggttctgaaacggttaggaggtggggtcactgggacatgggaaggaggttgttttctggttaaggaaagagatttgcattttcacaaaggaaatgttttcttcttttaggatagagggacagcatgttcaaaagtcagaaatttgttctgttctctaaagtggtcagcggagctgttttgaaataggcttttgctgtttgtctgagcaatgcctggattccaggaaatcatgtattgatttagtattcttcataccaacattactacttcagaagtaattttaaataagcaaagaaagatatgtggaaggtacataattaatcatgcaactgaaatatgaaagtagaaaaatttacatgggatccttgaaggttctgatcatgtgtttttctattagatactggatggaaacagcttgagtgaggttttgacatgtgtgaatccccaaggctgaggctttgagcatttcttgaatttgaagaagtggagtcagagtttgaagttcgttggttttcgatctcatggtttttgtgacaaggaaagagaaagaaggcagctttgaaagcccgctgaacttctcttaggaaaagtggcttactgttttctgtgtttctctgggctaagtgaagggggttgaggctgaggatctttctgcagttgcacaccttgggaagagcgttggccgggccgaccctcctcacacggccttcttactgagatcattttatgatgcattgagcttctctccccagttttactgacattattttgaggagttatatttgagacagattttaaaatttttgttatggaaattagactacataaataccagtgctgcaaatgtgaaaatgggaggggatttaaaaaaagaaactattttctgtattcctactgtatttttatatggggggcaagttacgtatgtccccaatataaaaatgactgtgctctagcaaattttaagcctgctatttatgcttgctaaattcaagagtcttatagtacaaatagtttttctcaagtttttctattgtattcccatttgcattttctcctaccaagcgctctttgagtcccatctctatactttgcaaagacagttcttggaggttcaggctgggcgcgtgcttgcctggcattgggtccgtgttttgtgcggtagtctctgtgtaatacagcttgcctctcacctggagtcatctggcctgcaggcccctgctcccccaaggcccaggatggcccggaggcacttgctctgggtgtgctacttagtgcatggaaccagggctgggtgcaggaagagggaggaaggctgcaggtcaggatgggggactgggagctgggtgagcacctccctgaggatgagcaggcagcaggccagagggtcgggagccctgaggaaccctgcttgttggcctttccacatggatggaacaatgatgttttcatctcctgagcctcagtgccctcatctccacaatggggacataagaatggttattggagtatcacacaggacaatccacagccagcacttagagcagcatattccaggcgctaagcactcaagattacctcaacccaggcttggggtcttagaaggaggtgagtacaagcagcatcttactctgttttctctggacttgactaacagcagacacaccacggtaagctgtgtagagaatatcaggaccttgtgtgctgccttgactgggttcagagttctggagccccggcctctgctctggggcgctccacaggcctcttctggtctgcgggctcctcctttacttcagggcccttttgccgagggcttccttgttttcaaccctccttcctacccttccctcctccctcgctccctttcttgtcagtattctttccggtttttgaggcctatctccagatcgcttttccactcattttttaaaatgcgagcactttaattctgcctagaagccgagggagcagttacatccatcagtggctcaactttgccctaacagaggagtcttacgatcctgttggcaaactcttggccccctactgttcagatatgactagaacttttgtctttatagctaaaatgggatattatttacaatatactctcttctaagaagactggagagccaggagacggaatgacaaagggcaggactgtggctgtggcttcagattgatctgggttcaaggttcggcctaggggagtgacagctcctttcagcttggtttctctccctgtggaacaggcacacttcctgccgtgtaagcatctaaaggaaagaacgtccatgggaaacacagtctatgtcatcgtgttgcagttgccatctccactccccacgtggcccttcctggggagtgcactgctgtgactttgtatggtttatctgtaatgtcagagccattgtgtacacggagcaggaattcacgggtgtccacaagtgcacttgcccagtgatcctggatgattctccctattctgtcccctggggaaggctgccacctggcctgtggctgccccctacgttcccctcaggttctctgcaggagcccgagggagctgggcgagtggtcatggggagacgctcacggcgcgggttgcctctggattgttctgtgtggctgggagctccggggcaggtggtggtttctctgtcttctgctgcagctcacctctgccaggtgtgtggcttcccaggggaggaggccagagggtggcctcgtattgaatggctatatattctcttccccgtattctgttgggcagcgaacagggatatttcacttcctgttaatagctgtgaacaagccttagagcctcgggtgttagtggatgacactttttattggatccttcaccagcccgtttcctacagcaggcagacagcctgcctttcatggtgtgctgctctgacggtaaggtccccttcctctccacctggacggaatcagagtatcccacgaactcttgtctatgaagtgccatgcttcagaaaggcgatgcctcattcttcttcctgcttaggagcaggattggcttgtgtgatctatgtcaccttgttcccacctgggggatatactcagtgttccggatctgagggcactgaggctgaagcgaggtgagaccttctggatttccagatgagctagaatcagtttagtttcctggccgtgccgttagctttgagtatgctccatggctcagatgtcttggccatatctcccatttgatatttgctaaatttcagcatgaattaaagttaacaagaaaatgttactgttatttgtaaagccagcaatactaagaatcacagaagctctgaaagttgctctaagtagcttttatcttcaaacaaaaatgtgtttggagcccaggctgaggcatagtgggtttcatctgccttttgcctctcctcaccatggtcaggttatggttggaccgaggctgctttattctgctgagagaccaaagggttttgcatggacgtggaggtctgggctgacatccattatctcctggggaatgagttttcctggctgcatctttctgtggaagaggaaatatgctgtcagcctaagttgccaggttttgtcacatcttttctctggctgctctatcaaaatattgtaccccgagcactaaacatacaaattacacaaacacaattatttgttatttacacaaataaaataattatacaaattattccttatacaaacaaaattatttatgaagtaccttctctggtcattgtactaggccttgtggaaacgaggaatgaaggaaaatatagaccctgctatcaaggtgctgagagtggggaggcgaattcacacctgcacaaagataactaaaaatgggcccagggagtgagggccgagcgggtccagtcattcgtagttcaggggatagagagattcatcctggttggattagtggtcacagtggcttcctggagtaggtgtgctggatggcaagaggagaggacagagtgccagggcccagaagagcatgagcgtaggttggcaatgagggtggcgctgtcttgggacagaaggacatggctggggcccgcgtggggcacggctgagaaagtgggttgggcctagagagacagaagccaatgtataaggctgcacctcctgccctggtcctaggacgggccacctgctggccggccggctgcggggagcctgaggctggcatcccacttggtggacctgccacctcattgttcctgcccagccaagcacgtcctgtggtgctgtgtttccaaagccccttggccacatcttagtgggggacagcagcgttccttcgaccgtccagaagcgataattgagtggtctgtgcagcctggcaagtgccacgccctccgaaagccttggtgagcacagacccccgaagccagcgctgctgagggattctcaccactggaccttaagagtaaggtcagcgtcgacaagaagccacaactttccctttgagcttcagtggaatttccacttaactgagagaatctgattcggggaaagcagggagaggagcagctccccctgctactggagggttgggaggaagctgcttctctctatatagagacctcatcaaactgaccccaaattaaatgaactggagctgataaagtacacccagttatgccaggattatgactttaggactttttcaggaggcaactttttcctcccattgccatttagggtaataacaaccaaataaaataaaatccaacttattaaaatctgagctgattattttacttccgaaaccagctcttcccaccttcgtcattttttctcccaaagagactggcatcctacttgtcacctgtaggcaccaagctatgactgccctccttcccttaaggcagcaacttcccacctcccaagcattttgtttattgaggacttggggatcaggctcataaccacatagccacataggtaacctgtgcataacctgggcttgcaaatgccagacgcttctattttttccctataattattgcagtaaaccttaaccataattctctatattagagaatagtcaccaaatgtccttttcgagttcatatttctccagttgtgttataaacatgtgtttcggtttgttctgtttatcatttgtttgcaccaggatccaaagaagccccaggcatcgtagatcgctttgctcttgaaggatctctgattctgtaggttatccctccatatctatttcccctccctccctcttcctgtcgtcgtcgtcgtcgtctcctcctcctcctcccccttctcccttttgtgactttgggtggaggggtctggcttgcttgttctgcagtttccgtactctggattttgctggctgctttcctgtggagtcactgaacgtgcttctctgtcccacaccattcctgccacgtggtaggtaatgcagaggtctggggagactcaggtgtgaacgctgtgtgtgtgaaactaccgcctcggtacagctcttccatcaggagcacattgtgtctgctggtttcttgtgtgataccgtcaggcatttggggttgcaaaacagtcaaccaaattctgtccttttttctcaagtaattagtggggatacatctataaagagaaattccccatcaacgatttgattaccctgaagtgtatatcatataggatttattaacttaaggatgggggttccctgtcactctgcacaggtgaccactgagatttcctctgtgtgttatgatgaactgatgaattgaaatatgtttgatgtatacacttaacatttttaggaaccccctctgctacacttggatagccaactcccaggtcgcatctggaatttggggattgtcaatgacctgtttaactccaggttaaactccaggcgtgcaggggctaagccctctccccttctcttccttatgatctttcttaacattttcttttctctagcttgctttattgtaagaatgcaatatatcataaatatgacatacaaaatgtgtgttaatcgacttcttatgttataggtaaggctttcagtcaacagtaggctattagtagttaagttttcggggagttgaaagttatacacaaattttccaccacacggagatcacagccccaacccccaaattgttcaaaggtcagctgcacatagtggacactcagagtgttgactggagactgttgatcctttctctgctgcctcccagcatcctatgagcatggctgccaggtgaacagtgcccatgaggctctgtggtagacttggtgcctgccacggtgcctggcgcatgtagcatatggggcatggccctgtaaatatttgctgagtgtagggatgaatattattattttagaaaactcaagcctgaccagaggatgaaaaaggcttttgcttgcaaggcctagtaccttgcaagtggaagcagggattgaaaatatccacgtgatgctggcagcctgcatgagaagacaaaggaaaagactacataaggctggtgcccacaaactgcctgtccttcccatgtgtgtttagactgccataaacacccaaaccaaccaaagtagaagcctactctggtaagcatttattctgggaccagcagtgtgataggcttttactgtgcgtgtgaccagtcagggcttcccagtgctgcagccctggagggacagacctttggcctctaaatatccatctgctgtgtaggaaggaccagtcctgccaagcacagaggaaatgtggagtgcttctggccggccctaaagacatgtaagtgtgtgagcaggtgtgagtctgtgtgtgtatgcatgagatgtgagtatgccagagtgtgtgggactgtgtgtggtatttgtgcacaagtatgtgtgagaatgtgtagttgtgtgcacaagtgtgtgggtgtcagagagtgtgtgtgagtctggtgtgtgcatgcatgtgactccatgtggtgtgtgcatgcatgcgtgggtgtgccatgggtggagtgtgtatgcaggtgtatgaatatgtccatgtgtgtgagggtgagtctgtggtgcgtttgtgcatgaatgtgcacgtgtgtgtataagagtgcatctgtgtacatgtctatgtgtgtgtttgtgcatgtgtgtgtgtatgcgtgagggtctatggtacatgtattcatgagtgtgtgtgcgtgtgtgtgtgagagagtctgatgcatttgtgcatgagtgtgtttgcgtgtgtgtgcatgtatgtgtgtaggtgagggtgtgtgatgcatgtgtgtgtgagaatgtgtaggtgcatgtatgtgtgtgggtgtgtgcatgtgtgggtgtgtgtgtgtgtgaggttgagtctctggtgcatatgtgcatgagtgtgtgtgtctgtgtgtgagggtgaggctgtgtggtgcatgtgtgcatgagtgtgtcacctggagtcaccaccactcactgcctgtggctttaggcaagttgttcagcctctgtgtacctcgattttctcatttataaaatgaggataatattggtatctctttcaaagggttgttctgaggatttactgaaatagtgcaggacaggcaattagagtaatacctggcccacagtacatgctcagtaagcatcatctattggagggtccactgcttcctggggattggaattaggtaggaagggagctgctgtttgccgagtgctcactgtttacatgcatcatctcattcatctctcaaaagcaccctagaaaggtcataagaatgcagcgctcagggcggtggggtgatttactcagagtcacacagccaaggcgtgccgctgctggggtgttgaactcaggccatggttttgtttgtctttggaggtgctattttcccctcccatggtatttttccagtaagatagggatttactcatcagttcttaaaaggcttgaagggcttgggtggtggggatcaaaccaaccgtcttctgttcagaagggccacagaggatgattgttttcaattgatacatagttgacgatttttggtttcatgctggattttcaaacagattatgaaaaattaacctaagagcccctgtgtgtcagggatcattgattctgttgattccttgggatttcctctacaaactgataagctatcccttcttcgattgtgtcctgtccaggtagtactcgtatgacccagaagccagctctcctctctgactcactgtcttgtcaggaggatggagatgatgacagctgccctggggaggcgagaggcagcgtggcttcagcatgggggcggctctgtttctgccatcaccatccccgcttcacctgctgcgggcgccaagagcccgcctcagccacatgtgggcttttagcctctgatccccagtttccctctgactcttgtctgagcgcattggctccttcagcatctccagctgtgctgggaggggtggggcctgcctcgggggccttctggcattcagcagattggacttcccatgttgacgttgctgactgcagggggtgtgggtcaggggtcttccaggttgtggtgttaccttggagcgaggctggggtgaggggctctgggtttccacagacttaattctggctggcctccatcaaggccatgttcaatgaatcaggctgttgtgcagagcagcctgtgtgctttggacagggctccccgcccgcccccccttttttttgacttaaagaatctatggcaaagcaattactgactgtgacagtgacccaaggtggtatttaaaacaagatgtggagggcaatatgcctctctctgggttcgccacgggatcaagttgcaggggctgtcactggcaacacgcttctgcctgaacggttctgtgggatgagccccagggaggcgctggcagcctcacaccctcccctcccagtcccgccccttgtgttggctgcctttgtttctccaagacggttttctgatcaattaaaatcgtgtagggtcttaaatggtaattctgccttttcaaataaacaaaggcggagaacaaatgggagggtaagttttaataaaccttaggcatcatttcctcctgctgtgacactaaatttacttggataaaaacaacctcttagatttacattttgattctgttactgctttcatgtgtgcggggctgtcccacttcagatgaaatttatccacttctttaaatatttagtagtctagcgtggatgttaatgaaagtctggcggtgctattttgagaattgcaacaatgatagtaattttcagtgtcagattcctgcttcgcaaagggaaagagggatgggagaagggggagggaaaaatggtttcagttctaatagagtttgccatccgctgggccgtgccagacagatgggtcatgaatactgtctagacgctctctgcctgagcgaagccctggtctctaaggacacgcaatgagacgccggcttaagtaactggggaaagtcagggcaagctctcctgtaaccagatagaaatcaacgtgatcctgcttcctgggggaggccaaggggtggccgggagggtgtagggagagggggtgctaagagaaaaggcccgctgttactgatcaattttagtgcaaacttgacaattattaggcattagggagagcgtgaaaggacagttgtaggatgataacactattgatttaagccgtactgcccagaatgcagaatgatatatttcagacccaggcttcaaaggccggagaggagctggggtgaaaaggaggatgttgtcgtgtgtgcttaagacgggaatgcagcccgcggggtgacctgcgttaattgtgtatattaacacactcagcactgctcttgtggaaaccgttggtcttgactgttcatttagcctcttaatttgcaagggttttagaggcttaccaggcttgctttctctttttatgaatttctgcgaatttcttcatgctgggtctcttccgggcagctccacaactggcagagctgtaggaaagcgggtaaaaaaatccccagcgcctgcctggctgcgcttgggtgcctgcgtagtcgtgatgcttgtcttcctaattattttctgagtggcggggatggagtttatgtgatgtcagaagtgagtttctgctcatgaagactcccagtgtaagtgtggtgggagtcgggaaggagatattgaggtaaagatgagattggggggcggaggctgggggaccaccgataaggcgggaggtgacgcagcagcttgccgttcggctgggaggtgctttgtcgcttggtttgatggccgctaatcacgtcttggtcttgaaaaaaattatccaaaagggtactacggtgaaacttggaagggaccatctttgagtaactgaagaaataaagctgaagtctaaagctgccatgagatacgtcgtggactgcagaggtgggtgaccctccgagggctggacttctggattcatcctctgggctggtgcctctttcagtcatggcagctttaacatgggaaagaaaccccaacaacctaaactttgcagtaatcattttttcactccttcatccattcttgttctgtcccaagagctaataacagagggaaaagaagatattttttgcttccttcccagaaagaaaacagagatcaaagataaaaaatattttcaaagtagacaatcactggagagggaagaaagaaatcttgtttcaggagtttgcagtagtgagcagcgagtgagtctgtcctttttccagacagctcctagaaaaattgccgtggtcctccggaaggtccagctgtccttagaggggcaccttcttgccctagaccctttgcttgctgttcacaccaggaccatccactcagggcagaaacttttcattccctgggatggcctgtagggaaggggcacatggcagggggctgggctgtgggcatcagcacttctcctgccagccatgaggcctggaaggggagccttgtgctaagtgacacttaaaatcttgggaccataaagtgcatctccccatttcagagactggtggctcagtggggtgacccccaggctcatacgtgtgcttgggagaggagaatctcagattgccctgcctccttgagaaaggcccctgtcttcctgcgggcgtgcacctgttccggagagggcccctgagccaggctgtctgctgtggatggctctgccatggcgctatctccttcatccttatctatctcttcattgttagtggagggtgttgggcatctgttatttgctttattctaaaaattcagagaaaaaggaacttgagctacacttcaggccttttacccttagatcttgggggaaggtcagctatggttccaggtagggtgtaccgccgcaggcccttgcatgccagctgttctccctgtctgggtttgggcaggtggtgggttcaggcccaaccgctctctctgtcatggggccggggtggtggctgagccaatcaagcaaaatgatggaccttccatcacgggatgtaagcccgtgtcttgacttcacgtgactttttgtggaaggacagccaaaggaacacattaccgagagagttcgctcttccatttgcataggctttggagatagaagtgttgagtattgtttcttccttggtgagaggggttggcatgaacccagaattttaaatgccaatctgaccttaaaaggctggcagagaccctgcccttccaggcctacccgtgcctcccactgaagccccatgaggcctctagatcagcggctgctgcctcctctcacccttctggttcagtgtctgctctcatgttaggagacgttaactggaaatgacaggacctggggccagtgcagttagcttctctccccccacccccccccccaaaaaaacacacaagatcccaagactgattagttttcataagttgttgaaggagaaatagttgttgaaagattatgtctggacagggggctggagggtgttatagagaaaacatgtttggggtagtcacttgtggaaaattatatgctgagtaatacaaaacatcccatctctgggatacttcatggaaggtatttttctgagtattgaatgcgtgagaggcatgggctgggctctatgggcaggtgcagggctgcaggggctaggtgacatgggagggtgcagtgtgtgtgagacggaggctttgcctcccagctttgttctgtccagtgctaagtggtgtccttgagaaggcccacaaagttgtggcacgtatctgcagtgccagtatgcaggacagaaggaacatcttactaagcctgggtgctcagggaggccaccatcatgggctggcagggtctggagaacccctgctcttcagggggagtgtcgtggggagacgcctgggcagggatgccacataggcttgtcatggaagcttgcggggaggggagggctgactttgaggagcaccactagaaaggtaggtggggtcagattctagaaagccagggatgtcaggccagatcgctttcattctctttcatgaaggaagtcattgaaggtttttgagcaagagaggctacgacacaaagctgttgtatagccggaaggtccttagagatggcttagtttagttctgcactcaggaaaggaaactgaagcctgagattacgtgaccacttcaaggtcacaaaaatagtctttggcagaagtcctaatatgtatgtttctagtctgtctgggctactattaccaaataccatagactgtgatatggtttggctatttgtcccctccaaatctcatgttgagatgtaagccccagtgctggaggtggggccaggcgggaggtgtttgggtcatggggacggattccttgtggcttggtgctgtccttgaggtagtgagtgagttctcacaaggtctggttgttcaggtgtacggcacctcccccctcactccttgcttctgcttcccagtgtgagataccagtccccttttaccttgcatgatgagtggaagctccctgaggctccctggaagcagatgtcaacactatgcctccttatgtagcctgcagaacccagagccaattaagcctcttttctttataaattacccaatctcagatattcctttatagcaatgcaagagatggcctaatacagatgggatggcttataaacaatcaaaatgtgcatcttacatgtctggaggctgggaagtccaggatcaaggtgctgccggactcagtgtctggcgagggcttgcatccaggctcacagaccgtgccttctggctatgtgcttacatggcagaaggggaaggaagcactctgaggtctctttcccatgggcatgaatcccaatcctgagggctctgccttcatgactgaatgcctcccaaaggtctcacctcctaagcttgtcactcaggggttaggatttcaacatatgactttgggggtggggagagagtacaaaaactttcagagcctagcagtgcttcccatttcttaggacagttctccttccactagaccctgtcctcacaccaacttgtcaggttaggcagtgtcagggtggcaggaggaaatcacccggaaggaccctcccttgcagagtaggcagcctatggtgaacgtggcgtgtgcccctgagagtagggactgggcctagctaggaaggctgtcagaggggcaggtccccagtagctgtgcctttgggattatgtaaaaaagggtttggaggaatccacatgaaagccacagcaggagatgaatagggagggaagtcagagtgtgcccggcacagcagggtcccagtgtggtgtccccagttttggggttcacggtggcagcggcggctcctggccaccctccttgcagcgcttggaggatgcagcgggtgcagactgggtgccgtggaggggggcgaggaggagtctggggctatctcctggcagagggatagctcagcaaaggtggtgggtgcactagagagagaggaggacccctgtgagcaagtctctgcgagggtaggatcgagcctagagagtggagatgtggacggaagaactccagtgcacaggaggagactcttctgaagctggaaaggaggaaggcgggagtccttgctcctgggcagagctgctgctatgagtcagcctggggctggggagttggaaaaataccgacataggagggatctgcagtcctgacagtcagcatcttggtcatgctctgcagtgttcaaaagagctttctgcgtgtatgaacttctctccacaattccaccaggtcgcgtgtttactaattgctaagtgctttacttgagtcatctcatttaattgttagaacaaccatatgtgataagaactcatcggacccctccttaggattaaggaggtcagtggcaatgagtccagcctcagcctgaggggtgacccccagcgagaacctccaggaaggccagaggcaacgtcctggggcaagtgagggggaccacgggggatgctacatggaatgctgctttccaagtgcaaatgaccagggagagaaagggcacagagatgggcttgtgctctgctcagcatggggagcaccgcaggggtgcacatgagcgagcgtgaggtcacgggatttgcatcatgtgcaaatgaaatgcaggaatcacagggacagtcatcgttttaaaagaagcaggaccccggtatcttgccctttgaaaacagatgatggtggactttgttttgcattgctcctggtgtgcctgtggttgcgtgcacgtgctcgcgttttggaaatgaggaggcccgtgaactggtgtcctgctgtgtgtgaacttggggtgtgaggttcgaaaggagcaggacccttcatgatgtttttcttggaggcccagccctgaaacttgtttgtgtcatacatgacaatggatttgtgcactttttgtatcacaggaatgagttaaaatcaagagtcagcagctccgctactccgtagtgaccttggtttattaacacctcaagcctggtttttcgcagctgccggcaaggaaggcaggtttgatccctggagtcacttgtgacgcaaaaaaaaagcattctgaaatggtgacttgacctctgttattaactttaatgagataaatattagatggaacatttagccaagagaggtgtttctttgtaaatagtgttattattttcaggtgtctgagagagacgttgatcagggcatgcgatgtctttgagcccccgctgagatgagagccccagctctgagcagtgcccacccatcctctgcagggcgcccggtgctccacctgcccttccctctgttgcccctcattacctcccagccccgtccccagtactgctgtgtaatctgttcagtggggacaataatgacgcaatgtgtgatccagagtctagcacctcgtggcgccttgatggaaatagaaagctgtgatcacagcattaaaatatgctaacaggctgcgggagctaatgggcgccgtgttcacactgcagatgttcattccggcgctgccgccgactgcggggacagagccggaggctgcgccgtgcacacccagcttctcatggtggttttgtttattgccggggtgttctccaaaaggggcatcctgcctcctttataaggtgtgctgtctttctggctctgcgatgatataagacccctttttgtctgactgttagatgcgcaagcagactcagtgttcacgtggagggaatgttagcaatgataacagggtgcagtcgtttgatgaaaataaattggattttatcctgtttgtggttaatgtttatctagttggagtttctgagcactagaaaggggttccaaatgcattgtctaaatttgtgaaagaattccagtataccacatttaaagggatgatttaagtgcattatattaagttgtgaataatatggaattttgagtgtctggcttgcagtgctgtcttccatttgcttcctgggtcggcctgggaaatgactccattctcttcatcatctttgcccttattactagccaggcacctcactccttattttcgtgctcttactttggggaaatccatcggatgaaacatacactcagtgagtagacaaggcagccagaggctatctgcttacaggtgggtggctttgtccacgctgaaggatgcctgtctctgcagagagggtagcagcaggacatgcctggcccgggatggccatccacctgagccacaggtctgggcacaggcacagatgagctgggaaaggggctggcctggtccagaaggtgctggagggcagagaggcactgtgttgctgtgacagtccctgatgaatggggatgtgtgggatgtcatgttgcctttggagatcagaccactccaagccctcagcagcagccttggtcctgatgtgttcattcatcaggcatcccacttggctgcgcacagtgctggatcacctgcggcgggagcagggcatgcgccctggtgggtgctcagtccgcgtttgttgagtggatgatcacaaccctgcaaacatgtcactgagctaggcagtccaaagggtgtccctccaagggaggcgaagctggtggatgctggacacctgtatgtgcaggagctgggggctggggagggggcataggtgctgcctgggagaggcaccaggtgtcctggcaccaggaccagggatgttcctcaggctgggctggcagacaggtcattttacccagtgggcacttaggcaggaggcctggggtttccaggctttttgggggcttatgcaaatattgcagacctgaaaaaaattctgcttccaagataggcagcgaaaactgccaaattaaaatgcacacatttaattaaatgttgacaaaacgtgatggcttgtcaaatagtcacctgcaattcattgtctcaagtgggatgtggtgctttttcctgggtttgatgtgacatctatgaggcccgtaaaggtcatgagatgcccttgggtagccatggtgagaagaggctggaggctgcaggggcacctgctcctgctgagcaggtagaggagacactaggagcagctcagcatccccccacagcctggacggctctgagggtgggtcgtcattccctctgatgagctgggccggatcacttgagatacaggcagaaggtggagagggggccaagtcatgtcctccccgtggctggggcagagctgtgcatctggcttcctccttccacacagccccagggaagatatccgggggcttggcaacctccccttcagctgcattcagccccacaccgggtgccatttctggtgatctaacatacaattgagcaactcttggtggtgctaagataaatggatgataaattgcagttgtatatttttaagattatgaagaaagcaaacatttaaaatacaagcctgtttattagtctgttttactcagagccccagcttccgaagtctggttgccctgaattccatgtagaagtcctgccgggacttctggcaggagcgcccgccatgtcccgcgctgtctgcattgttaggaaacgtgtccttgcttggctcccagcatatggaggagaagtgaatgtgtcactgctgtggcaggaacacatcttccaagaactaagggacatcttgtcacggactcctaggcaggaaacagggcagagttccaggtgtcaggtgctgtggtttgaggtgtgaataaataattaccaaaatgactggctgtggtggggaacgaggagcatgtacacgttttgcctgaaagtgggagcctgagtgttagcatggtccccccgccgtctgcctgccttcctgagcgtgccacatctacacgggggtgccccttcctgaccggggtgccctctctcgccttccctcctgctccctgtgcaccttgccagggtttccctgggcagctctggtgaagggcgtgcgtcacgctatccaggccctctccacgcctcagtggccagttgcctttcctttctttctctttctatgatgctcctgtattgcccctggattcctctaacccacatcatgttggattttaattatgtgtttaatgacttctctcttactagattatgagtaaatccctccaagggagggtctgtgttttgtttatttttggtccctgaatgtccagtgcagggtccatgtgcatgcacatatacacacaaatccatcagatacacatgtattcataataagtttgctttttaaaagggtattttatataaatagaaatgggaaactattatatttgcagacatgaaccaatgtatgctatcagtgcgggtttgagccccagcttcaggctcagtaaatcataggtcagcagaacaatgccacccatttttcttgggatatgtggttttttctagattctgtggcttacagtgctatccaaaattccttccactcctccttcacctcctttctcagctcccaggatttctgtctgcctggggaaaaccctcaccctgtgtttttcctctggtgtgagagcagagaacagtcatccacatagaagaacacttctgtggcctagtgtgtggggcttccccacagcccagcagtggacacctgctgtagtgtcagctccacaggccggggggtcagtccccaaggctgcccctcagactccagttgcaagtccaggcctcaggaatttctgaccgactggcttcaggttggggttctcacaacccccttgctatgtttgattaatttgctggggggtgctcacagaactcagggaaacacatgtttacatttaccagtttgctccaaggatattgcaaaggacacagatgaagggctgcgtggggcagggcatggggaagatgtggagtcctgtgccctccctgggcacccccctccaagagcctctgcatgttccgccatccagaagctccctgaaccctgtcctcttggatttttatgggcgcttcttgatgtcagctttcttccccgctggtggggatggggccttctctgaggaggatcgtatgagcaacaggaaaggctggaggagagagatgttttgcctggcagctgaaaggcggacagaaaggacaggagaaggttggggaagttctgtttcctgaggcctgacgcacccgaccttctaacagaagactgtaacagggctgtggggtacacaagccaggtgccgtggaggaaagcctgtagatagatccacatcacggcaccaccacttctccccgtggttcacaggccctccccaagcatcccagggccctctgctgtgaaggcggctccccctgcctcgctacctgggcccccgctcccctgtgcagtgtgcttatttcagtgctggtctgacttgctctttgtggtggtaagctccatgaaggcaggaccatgctcagggagtttcctgtccttcactgccccagggatgtggcaaatacttaatcagtgtttgcctatggagtgaacaggtccatgaatggtcttggaaaatgatgtatcccagcaccatggtggtggtcattcatacgtgttctcatgacttctttgcttttcctaatggtgagttcggtaggccaattcatttcttgctgaaaagtgtggtaaaggcaagtctcctaactggaccaagactacagcctgcagaacgcgcagggcctgggcatggggaagcacggatgaggagcctgctgctgatgctgagcaggagccgtggaggggtctacaccactctgctgactctgcgtgatgaggattcaaaatgccattcacgcaaaacaaatttagcaactaagaagtagagcggcgcgctgctttagaagcactatgtgttagcaggtgtggtacacacctgactttgcttctgtggctgaggaaggggaatgagtcttctgtgcgtaaatctttccacaagcaccatcctgggtgtcctgcctgaccagacttgtgagccagggccaggttgaagcatgtgcccaggtgaaaattatgcattatttattcatgtgagcaactctgcgcctattttgaaacattcactgctttgttttgtttgttttgtctaattgcatgaaagatgtggtaggcagaataatgccccccaacaaaaggtgtccacttcttaatccctggaacctgtgaatatgttaccttactagcaaaagggactttacagatatgactaaggctaaggaccttgagttgcagaaattatcctggaccatccaggcaggcctggagacatgagtcctctaaaaacagagactctttcccagctgtgctcagaaccagaggtgaccaccaaagagagatcagagccatgccatgtgaaaaggacttgacttgccattgctggctttccagatgatgaaggggcctcaagccaaggaatgtgggcagcttctagaagatggaaaaggcaaacaaatattctcccctagagctctgggaaggaacacagctctgccacctccttgattttcacccagtgaaattagttttggattcccaacctgtagaactgtaaagtaacaaatttgtgttttaaggccaggtgtggtggctcacgcctgtaatctcagcactttggttttggaaggccgaggtgggagaatcatttgaggccaggagttcgaaaccagcttgggcaacatagtgagactccatctctacaccaaaaaaaaaaaaaaaaaaaaaaaaaaaaaaaagccaggcatggtaggttatgcttgtggtgccagctactccggaggctgaggcaggaggatcacttgagcctaggagcttgaggttacagtgagctatgattgtgccactgcactccagcctggtaacagactgagacttagtctgaaaaagaaagaaaaattaaaaaataacatttggtgttttttttttctttttgtttttgttttcctgagatggagtcttactctgtcgcccaggctggagtgcagtgtgtgatctcagctcactgcaacctccacctcctggattcaagccattctcttgcctcagtctcccaagtagctggaattataggtgcccgcaaccacgcccggctcatttttgtattttttgtagagatggggtttcaccatgttggccaggctggtctcaaactcctggcctcaggtaatctgcccacctcagcctcccaaagtgctgggattacagctgtgagccaccgcacccggtcaaattcggtgttttaagccactgagtttgtatagcttgttatagcagcaatagggaagagatacatatggctttgtctatagaaagatattgcttaaataaaaagaagaaaacccttccaggtctacattttctcaggcagtgcttgcgctttaaggagcacgtgcaggatatttacatcagcagcaagtatatgaatcgtagcctagtctcatcgttagaggtgcataaactcaaggtaagcataccctaagtttccgctcaaggtcataccctggctccagccctgtcacatggttaatgttccacagccagtgactgagctggagccagggccactgcccccacgtcgtcacgccatggtcattgtcatttcactgcagtttctccagcttccttttgaagaggaacacaaaggagaggtgctttgcaaggatacagtatattataagaatagggacatgtttgaaactagtagttaatgaacattattttcctaaattcatagcttttattttgttttttttaagagacagggcctcactctcttgcctaggcttgagtgcagtggcgctatcacaattcactgcatctttgaacttctgggctcaagggatccttctgtctcagcctcctgagtagctggaactacaggcacacgccaccatgcctggctaatttttgtgttttttgtagagatggggtctcaccgttttgcccaggctgagctggaactccgggcacaagcagtcctcctgcctcagcctcccaaagtgctgggattacaggcatgagccatgcacccgtccttaactgatagttttagagcagtccattagagtggacccatgtcatctgacgaagccatgtgtctgttttgtattttctaagagatttggtgctgagtaaagaaaaagaaaattcttcatatctgatgagaaggtagtgctgttgagagagaccaaaaaaggacaattagtgatgagggtatttaaggcagacagttcatacctcctgagtttttggaacatgtgtctctctttggtaaaatattttggggataatccctattatatgtgtatttaattattttaatattatatacatatactattataaacttcctaagataaacacaaaattatagattttgctgaagagcaaaataaaaataaaattgttctccccttttcttccaacaccaaatgaatcagcccactggggtgtagtaggcagctctgcctggaactgcctgccatgccgccctctgtgtgcctggaacagcctgccatgctgccgtctgcatggccggggcccttctgcagcccccactgcaccaacctttgtccgcctttattgttggtgaacacagtgcccacctcaccatgctggggtggcctggcttgctgtctcttgagtaccgtgggaactgaggcgggctggccttgtctccccagcgcctgctcacagaaggtgccccatgatgtctgtcgtgcagatgaatgtgtccacgcgtgctgggctagtacagaagatcggtaggcaggggtcttcgtggccagggcctgaggaggaccgatagccttggggactgcatgggttttgagagtctgggggaaccagggggaagtaggaggacatagtaaacaaaggtcaagaagagcgaggaagacgtggggatggggacacgtacctgactgaggaaaatggattctaggaacacaaacgtcattgaagaaggagagtgtgtgttactggttgagggtgtcctggtccttggcatcttgaacaaataatcagacaaaacacacaaacaaagcaaggaaagaataaagcaacaaaagcagagatttattgaaaacgaaagtacactccacagggtggtagcatgccctagcaagcggctcctgagcccggttacagaattttctccgctttaaagactctctagcggtttcccattggttacttggtgtacaccctatgtaaattaactagtggcctttgatcagtctgattggttgcaggaaggggccaatcagaggctgaagcaaagttacaaagttacaccctatgcaaatgtctgattggttgcagaaagtgaccaatcagaggctaaagtgaagttacaaagttatactcctatgcaagacttggcccctgaccagcctgattggttgtgggaggggtccagtcagaggtactttcaatttttcatctgccacacagaaaaagtgggagggggcagggttgcaagggagtagcctctggtccttgtgttacttgggcatggaaagttggggttttccttttgatttagttctaggaagtcggtgtgaatcggccttaggttcccttcctccagatcctattctcctgcctcatggggtcactgcttgcctgggtggatgagctggagcttcattctgtgaaagcagtgggctggcttcagatcccgtgacagctgcaagcacagcagaaccaaggcaggcacttgtggacttcttcactggcctcaaaaaagcaggtggtgttgtcaactgtggttacactggacagaaagaacactgttaccaggggccaggtgtgcaacagttctgactagggccgtgggagtaaggccgggaagcaaggggtccatgcagttactctgagctgagacgagcaggctgaccgctagactgggggccacagggggacgggccagggatgcatccaggtgtcaagccagggtgcatggtaatgtgactctccagaccacacagccaggtagggggctggttttcaggatgagataccaactttggtctaagagaggtgacttctacatagggctgtgagacaggcactgttcaataagcagttggaactaatttttttggattttaatgattccaaaaaagaaatctgggagctacagaattagcatttatcttcttcccttaactgatacaaattcttctatgccaagccttgaagagcgcccaagaaaggcgtatatcaatgcggaaggtgggagtccaggaggccagtgtgggctcagtcatggtggctgtcacgggcggagcagggacagcaaggatgtctcccagaaatgcagagagcctgagcagagccccgcctgggagcttttctacaacaatgtagccagagaggttcagcctttccagtggggggcagctcgtggcctagactcggtgaggatagtatactctcacgcggagatgttcctggaagcctcacacacctgtggccatgctgtggtggcctttgcagggctctctagggcaagctgaaggcagatcccgactgccaggggcagcagccagggatggcttacagggcaagcagagcattttcctacctgtggtcccgctggggggcccgagaccaagaatctccacgaaacaattggtgacccctgaagatgccacaccgggtttctagaatcacacgtgatgtgtgtgtgcacctagggaatgggagctcttcctgggtgtggccatgtcccccctggactcctaaaggttggccttatgggatgggtgacaaccagctgccaggctccctccctgtcccccagttctccttttctctattcccttcctgtacctcttttggaggccatgctgcctgcccacccgcctccctggaggtgtgcagccccctgagcctggggttcagaagagcaaacccaccggcatcccagggcacctgcctgacgaagggaacaggatgccttctctgcattcccttcgttgccctaagttaacactatagctccattctgttatttttgtgctcaaacaggcttaaaaacagttgttaacacatattctcatctcccaaattgtcatttttttgagatggcaaggaatacatcacgcctttggatggctttaatttacatcatctagtgttcacctcattcacacgattctgatacttatttctaattctgagtaactaacggcaggtgacagggcagtcacccaacagcgtatagcaccttggggcttcacagaaagagccctgcatgaggacctgtgtgtcacccacacttcaggccagcttgacagccacccccgcctttagggagctgcagcagctaagaaacatgtactgcagaataagagaaaaggacccaagattgctttttaaaaatgtgtttcttaacttgttctttggcataatttctgcattaatggatagtacttctcagcctttcatgaaatttctgcctcttatatgtggagaaaacagaggctgttttaaattataaaggaaagctttaatctagtccaagaaactgggggaaatagacttcttttctcgctttcagccccatttccctacctaatgttaaatatggctatttctcccaatttagagggttttctttgtagaatatgaatgagctatttactgggtaacaaaaagacaagcctttcaagtacaaatggagctttggagatctctcaatttgaaagactaatctctgcataaacacaactgtttctccatattgctgggaacactccatctatctgtttggccacattttctattatggtttttataaaatgaaacgatggctaatagctcagcagagaagtatttgggcacagtagcaatagggatgtgtttacattgctttaaactgtgttgtgagcaaagaatagtaattttctatagaaattgctctaatctgatcagtagaattaggcattgcatattttcatttctgtacctttatcggagcttatgtcaactaataatctcatttagatacttgggtttttcatattaaatatctggttatacctgctatatctttcagcctcaaaactcttagatcaggtcttcctttttctttacacaagtggatagcagatgtgacaataccactgtctgccacagggaataatttgaggggccaccgtgtgtctagaaccttccacagggaagtgcacctgaatgtggaaagatggtgccattgctcttagaaatgccctttagggctgacagagcctgacttttttttttttttttttcacatcgctgtagatggggcttttgaaaccctccttcccttcagcccccacccccacccccaccccaaggttttaggacaaaatgggatgagtgaattcatggcttgacagactgaacagaaaaatgaggctccgtgctccatattcatgtgcatctgcccctcatggtgacatgctaattggttggccggtgcacaagacaaggaagtgcaggtttcctgttgctcacacagtgcttcctgtctgctgtggcaggagccgggaggaagggagcgagccaagaggggtgctgcccaccggaaacgatggcgcgaggccgcagagctaaatgggggcctctccagggagtgctctgttcacggctccatcgctgttagtaagtatcttgtgatttcggaatttaaatgaggttgtgtttaacctgcataacatctggcttttaaaatctgactttattttccttttatttctgtgcatcggctcaggcacacttagtggttgcttaggtgttgaagtcaggttaccaaacagcacgccctctctttattctcaggctgcgtgtttcattgattctgaaggtcagatggctgtgttcaagttctgttagtatattggtgtcagaaatgaaaagatgatgtaaccctttataacttcttaaaggctcatatcatgtcaggaaattaacctgtaggagttatggacaaatgcccatcctgatgattttcagccatgaaaatgagtaaaggggagatgggcatacgaaaggctgcatgtgttgagcatttgattttggaggaggatgcatttgttgtttgatggagtctacgaccttgccctcattccaaagggcagcctttggccctgggcatgccctcattggctcacaacacctacaaaccatacaacatttggcatcagggttgtatctgttggtggaggacacaacgccaaaaggaaatgggatttcctggttaggcctgcggcttggcagatgattgttatgggaaagacactgagtctgtttaggcaatttcttcctctttactaataaagtgttcctattttgaaagcaatgctgagttgtggacatgtgtataaaccgtaatgctgtaagttaggcctctcttgtctagaatctcagcctcttcatactctctcccccttttttgccatattattttccttatcactaactatatattttacctgtctcacttactatctgtctctcctctcagagtgttactccaggagggcagagataactgtttagtccaggctgtgccttcggtgctcaaaataatgcctgggtgcaaaataaatatatcttgaatgaaataatgaagtaatctttaaaatggtgctccgagcataattttcatatagtaacacatagtttgcaattagttgtctctttcagggataatggaattgttcaacataagaaaatcaggcctgggcacggtggctcaggcctgtaatcccagcactttgggaggctgaggtgggcagatcatttgaacccaggagttcaagactaacctgggcaacatggcaaaagcctgtttctacaaaaaatacaaaattagctgggggtggtggcgggtccctttggtcccagctacttgggaggctgaggtgggaggatcacctgagcctaagaggttgaggctgcagtgagctgtgatcatgccagtgcactccagcctgggtcacagagtgagaccttgtttcaccaaaaaaaaaaaaaaaaggaaaatcaaacaatataatataccacatttatagaatgaaagaaaaaaaatgagatcttctcaatagacacagaaaaggcatttgacaaactcttaaccttctttgattataaaaacacacaaaaacctagaaatagaaggaacttcttcaacaagataaaaggcatgtcctcgtccagctgggtgcctctaacaaaataccatatacgaggtggcctgtaaacaacagaggtttatttctcattgttctggaggtcggaagtctgagatcggggcaccaccagattctgtgtctggtgggggcctgtttcctggttcatagatggaacattcttgttatatcttcacatggtggaaggggccagccagctctctgggatctcttttataaggacactaatcccatttatgagggctccgccctcatgacctaatcacctcctgaaggctccacttcctaatatcctcacattggtaattaggtttcaacatgtgagttgtagtggggcacaaacattcagtctatagcagggtatttatgaaaaacctactaataccatactcagtggtgaaagctttaaaccctaagacaaggaacaagagaggatacccacttttaccaatgctgttcaacattgtactccaggttctagccagagcaactagacaagaaaaagaaataaaaggcatccaattgcaaagaaaagaatgaaaactatccctgttcaaaaatgacatgatcttatgtatagagtatctccgagatgccacaagaaagctactagaacaaatagatgaattcagcagaattgctgggaacaacatcaacatgcaaaaatcaagtgtgtttctatacatgtgccatgaacaatctgaaaaggaaattaacaaagtcatttcatttaaattagctctaaaagaataaaatacctagaagtaaatttaacccaggaagaaagatttgtacactgaaaacaatacaaaatattgctgaaagaaattaaagaatacctaattaaatggaaagacgttccatattcatgggtaagaagacttagtatagctaacacataaatactacctaaagccatctacagatgcaatacaatccctatcaaaattctaacagcctttcacttttgcaaaagctgatcttaagattcatatagaatttcaaggcacaccttacagccaacacactcttgagaaagaacaaagtcagaggactcacacttcccagtttcaaaatttacaaaagtactgtaatcaacacggtgtggcgtggacttcaggatagatgcatagacctatgaagagaactgagagtccggacatccacacagctatggctggatgattggatgatttttgataagggctccaagtccatttaatgggaaagaatagtcttttcaacaaatgatgctggggcaactgggttcctgcatcaaaagaagggagttggaccctatctcatatcaggtacaaaaattagcttgaaatgtatcaacgacttacatttaagagccaagagcataaaattcgtaggagaaaacataggggtaagttttcatgatgttggatatggcagtggattcttagctataacacccaaagtatgaacaacaaaagaaaaaaaaacagataaatttgactttatcaaaatgaaagacttgtgtgcatccaaagacattattaagagagtaaaaagacatcctacaaaatgggagaaaatatttgcaagtcatttatctgatgaaggcttattattcagaatatataaaggactgcaaatcaaaaccccaatgagataccatcccacaccagtcagaatggcgatcattaaaaagtcaggaaacaacaggtgctggagaggatgtggagaaataggaacacttttacactgttggtgggactgtaaactagttcaaccattgtggaagtcagtgtggcgattcctcaaggatctagaactagaaataccatttgacccagcaatcccattactgggtgtatacccaaaggaatataaatcatgctgctataaagacacatgcacatgtatgtttattgcggcactattcacaatagcaaagacttagaaccaacccaaatgtccaacaacgatagactggattaagaaaatgtggcacatatacaccatggaatactatacagccataaaaaatgatgagttcatgtcctttgtagggacatggatgaagctggaaaccatcattctcagcaaactattgcaaggacaaaaaaccaaacactgcatgttctcactcataggtgggaattgaataatgagaagacatggacacaggaaggggaacatcacacaccggggcctgttgtggggtggggggaggggggagggatagcattaggagatatacctaatgttaaatgacgagttaatgggtgcagcacaccaacatggcacgtgtatacatatgtaactaacctgcacattgtgcacatgtaccctaaaacttaaagtataataataataaaaaaagaactactaaaagactcaacaacaaaaggacaaataaccaaacacaaaaatgggcaaagggcttaaatagacatttatccaaagaagatatgcaatgaccaataaacaaatgaaaacataccaagtattcttagttatttgagaaaggaaaatcaaaaccacaatgagataccacttcacacctaccagaggggttatgattttaaaaatcagaaaataacaagcattggcaaagatgtggagaaattggaacccctttttattactgataggagtttacaacgatgcagctactatggaaaacagtttgatggtttctctacaagttaaacatacaattaccatatgatgcaacaattccactcccaggtgtacaaccaaaataattgaaaacaaggaccggaacagatatttgtacccactgttcattacagcattattcacaatggccagagagtggaaataacttacaagtctatcaactgatgaagagataaaaaatgtggtatatacacgtgatgaaatattactcagccataaaaaggaatgaagtttggatgaaccttggaaaacattatgctaagtggaataagccagtgactaaaatataagatatgacaaatatatgatactgcttatatgaaatatctagcatacacaaggtcagagagacaggaagtggattagaggttaccaggagcttggaggagggaagaattgagactttactgcttgatggttacagagttttgtgttcagggaagagatttggaaatggatggtggtgacagttgcacaacagtgcaaatgttagtaacaccactgaattgtgtctcagttactgggaggctgaagagggaggattctttgagccagggatttggaggctggcctgggcaacatagtgagactccatctctaaaaataaatctaataatgattaaagtggcaacatttgttatatatattttactacaataaaaagttagaaaaaatcgtgggactatttggagtgcaattaacaacattgagttttatttctccttctccagactaacatctaacaggtctgtggatcagaaatgatggtggagcagttgccctttgacatagcgatagaccgtgtggaaatggtattcagtaagcccttgacatccaaaggggtgcacatgcagacctttgcaaatctccaatagagggctgcagaaatgtttgtagagtctcttgactttcttcagactcatattttcatagagaaataagtgtttcctgcgtattttctcacctgcaagtttaatctctcatgaatggttgtgtttcatgaggaaataaagttttcagcactttggaagtgtgtataaggatggttagaaaatcatactgtcaggttgagatgtggattctcatccttccgccggcacctcaccaacccagcacttggccaccatccttgtggcacgtaattcatgtctgccacagcaaaatagccaatgtcctggagccctgagccctgtgagatgtgtaggaagtcaccctgcccctgtctggcatctagtatgagctctaggcatgtttgttgattgagttagtgagtcagtcactgtcagtcagaggcacatgctgggatgtgttgcgggaagtggatcgctgaccctctggtcatggcactcccgccttcctgctctggtatgggcctggatgagggtgcaagggtgtctgctggggtcagttctgcttccccagatcccagccaccctcctcagccacacacagcactgacctcactccccatgcgctgccctgctctcaacttccacttctccccagtgtcttgggcaagcagagtgcccacaaagacccctgttaggacgcaatgcctagcaggggtctttgtggccctggtaaccgccctctccctctccaccggccactgcagctgcattcacctctccacgcccaggctgccctggtgaaaagaagctcgtttgtagacaaagtgtgggagtgtctttactgtgggtgaaagagcaaacttggggatctctttgcaaagtgctggagattgttaatgatgtcataattagtaggcagcactcaaagtgttatgacatcattaaccagtgattgttgtactccgtggcctttctaactggcttgtgattgggccccaaggctgcctggccctccgtgagaccatgtctgaatagatacctgagagttagacccatgcgctgggtctggctgaggctgtgtgtagatcacagcagcgtgagcactggctgtacctttgccctgtcctgctgctctcactgtctgctgtgtcgggacactgagcagaagtggcggtggaatgcacacagcacagcgtgtcacagtgcgcatgggctccccactggaagggatgtagcattgtttttctttcgtaatggagagaagaggggaagaaaaggcccaggcactggttctccaactcttgtacatccggtcactgtcctgagattcagaaggtctggggtgttctgagaatttgcatttctgacaagtttgcagagagtaatgctgatgctgctggttcagggacccactcggagagtcagtggcctggagcactggagggctccgtggagctggggagggtggagggatgacggcctcgggatggcacaaggaggtgccgggtgaagaggaggtgccggaggcaggatggagcagctcacagtggtacctgggatggccccgtggcttctgccaagccaaattctcctgtttcataagaattgctcaccggtgagactccatttttcttgaagaacagtgttgtttgttttattttattttctttcaggcatatatagaatctttggcactataaaaagcatttaccgcataattaatatctaattgttcccagagaagacacaatcttataaggggaagtcatgggaagaaggaagctctggtcataaaaacacgatttccaccttctgtgcagagaaactgcactcttaattgtaggcagaagggtttcgtttgggtgacttcatcttcaccactggaagacgctgcccacctcccagccaaccccctccccagaccgagggtggacgggcctggccgtcagggaaggcctcgcattgtgccatccagccggggcttggccatggccagtctgaggcagtgtgggctcctgcgcctgttgtctttgaagtccctgcaaccagatcagctctctgctctctgagatcccagggctgtcgagctcattgaagcctgcaaatgggacagcactggccttcctccttttcattcagccactggacggggctggcccacgagccagcagataaaagaagtcatttaagctttgatttcagataaaagacttgaggttcatgaaatgctccagcataacagtgcagcttctgttctgtgctgcaaaacacattagaatacaaacaaaggggctgctccgtggagcctgcaggatcccgaccctgtccaggctgggtgccaggtctgagggtttgggcgtcctctccgccaatgagaaatccacctggcggcctcctctgtcctgttcacccacccactcccatccactctgtcttcttaccttaatttgcacctacttggccttaatgttggcagaaaggttacggagagacagtttaaggtcaagtgcaataaaatgatttcatttacacatcacagaggtccctggttaatacactgcagaatgttctattctcatgaataatcttgcttcacaaacatactccttgtttgttttcactgggtagaaagggacaggtttcatagttaacagcgagcacatctgagcaaacacgtacctctttttcttgagtaatgtgtagagaacattttgtggtagtgtttatgtctgtcttttgcaaacgttagaagatagtgttaattctttactcatcatctcagtatgtcattatcattctctgaacagcatttgtttgtagaagtcaacattaattaatcttctcaactgaaatgaaaatactttatgggaatacactgagaaccccccgcccccgcctgccagcacatcagatggattgaagcatttgaaggcagaatatagttcacagaaaaagcaaacctaattataacctaaagatcatacatcaggtgagttatgttcatttcaaaacagagacattaaaaatgtgtcttcttcttgcccaggcaaaaatcccacaagggtaagaaagagcacgtggcctggattcttcatcccatctccagcttctctagttgtttattgtaggcatttatcccatagtctaggtgtttctgcatgaaaatcatatcacagccagacagattcaaaaacctagtgggggctgggcactgtggctcatgcctgtaatcccagcactttgggaagctgaggcaggatgatagcttaaggccaggagtttgagtctctacaaaaagtaaaaattagctgggtgtagtgatgcatctgcagtagtcccagctactcaggaggctgaggtgggaggcttgcttgagcccagttggaggctgcagtgagctatgatcgtgtcactacactccagtctgggcagcacagtaagatcccatctcatatatatatatatatatatatatatatatatatatatatataacgtttacattttatatatatttataatatacatattatacaggggcggggcttatacaccagatccaaattcaaacactttctttttgagagacgcaacctcaggccccaaagtgaagttcctgagagcctgtggcatttgtctctgatccaggaaccaccttaaccccagacaaataggacccatgctcttgctgatgtggtttggctctgtgtcccaccagatctgttgctgaattgtaatcctcagcattgaaagtggagtctggtaggaggtggttggaccatgggggtggtttcttgtgaatgacttagcaccatctgtttggtgctgttgtcgtggtagtgagttctcatgaggttcggttgtttgaaagtgtgcagaacccgcctcgtgctctttctctcctgcattagccattaagatgtgcttgctccccctttgccttcgccatgattggaagcttcctgaggcttccccagaggcagaagccactatgcttcctgtacaggcccctgcagaactgtgagccagttaaacctcttttttaatataaattacccagtttcaggtatttttgatagcagtgtaagaacagactaatacagccgctaagccgtgaggaatcctcaaccagcccagcccctgcagcccttgggctgcacatttcctaggtcagcctgcaaaaaccctgagtcagacatatccatcccaacctcaggagttagacacgtgtcagattcaaatggaagcaacattgggaagcggcttccagcccactgggtgcagatccaagccattgctccctccatgcaggacagaaagtgatggtgtggccagtgcagcagtcctgataccccagtgaggacttcggggccaggtgggtcttgctcccttcctcctggacccagaggatggtctgcaggggagcagaggaactgggatggaagtgaagccagtgcctggccagagggagaggggccacaggtgcagatcatgagagtgtctggagactccagaagtagagttgattctaccccacacctacctggcaccttgtctcaaagacaacaacaacaaacaacaaaaggtctttgtctcccgaggttaggatggctatgtctgactcgggatttttgggtggcagttagagaggactcaggctgacccaggaaatgtgcggcccaggggctacaggtgctggggttggtggaggattcctcatggtttagcatgagctgagtcctgcttatctggggttaagatggtttatgggtcatagacaaatgccatgggctcccaggagccacagtttggggcctgagggtgcttgccctgggtctggggtggctcctcttgattgctgggaagcacccaaagaagccttagtcacatccagtgttgacgtgactccagagggaagtggagcagacaggagcctcaagggtgcaaacgttaagtttgctgttttcagtctgtgcttggcactttcctcactagatctttttcacttaggttaaacaattctttctcccagtatgaggaatgccagattcacagtggtggctctgttttttgttttgttttaagagatgtctcactctgtggcccggagacaacaggatccctggagcccaggagctcaaggctggttcactgcagctttgatctcctaggctccaggaatccttgtggctcagcctccagagtagctgggactctggtgctcgccaccacaccccgctgatttttttttttttttttttgtaaagacaggttcttgctgtgttggccaggctggtcttaagcagtcctcctgcctcagcctcctaaagtgctgggattaccggcatgagccactgggccctgcctggctgttctgttttgtatcaattaatgcagtgtgttttgtggccaatgtcctgggtgtctttgtagcttatggtgcacacggactcccattaccctaaaacacaagaaatcttgtgaacagccaacaagacctggcctcttccctccagaattcacagcctcatcaggagtacatatgaaacagctagctcacaataagcagccgtgcatgactccatgctaaactgtgtggtgcaaataataaaagacacagtcatcaaaggagtcaaggacaatggtgtagaaaggtggggtatgactgtgcttctgactctaaggaagaagaaaggacattgcagaggaacgaaagaatttgagcaaagggatggaggaggaaatggaaatggtctgatcacaggtgcccaggagatcggcctcattggaacagggtgtttgtcaggggaacgggaggtcagcctcattagaatggggtgtttgtcaggggaatctgagatatagtttggattaatccggggggaccagactgaagggtctgtaaatctgtaacagatttaaaactcggtatgttggcacatggatgccttaagtgcctgtggcttccttatggaaggggctctgctttgtgggtgagaggtggcaaagtcacgttcaggggtcacatctggtccagacgcatgtttaacttggtgtgtacacctcactgttttaaaaatgaagtcctcagtgtttaaaaattagaagtaaattgccaacattaagactgaattaggagacttcatgttgaaaacccagcctgggccggtggcccacatctgtaatcccagcactttgggaggctgaggcaggaggatcgcttgagtccaggagtttgagaccagcctgggcaatgtagcaagaccccacctctaaaaaaagttaagaattagcctggcatggtggtgtgcacctgtagttccagctgctcaggaggctgaggtgggaggatcccttgagcccaggagatctaggcggcagtgagctatgattacaccactgtactccagcctgggcaacagagcaagaacctgtctcaaaaaaaaaaaaaatccagtcatatttcttgcaaaaaatgggaagatgcagtagcaggtgggccacgtgtcccctgtccctaggccctctctgtctcctccacacagaggccaagagcctctgcaggatcttgaggcccatgatgttgtttgctcacagcccacttcactcactgtgggacctgcttggtgcctggtgaggactgttcctgcccctagatgtggtctccagcagatatttgcttcagcttatatttttggacaaaggaatggagtgacatggataatatttaaattggaatggactatgccttttatctgaaaaagttctctaattatatttttcttatcctttttgatgtctcaagaaaactcactaagatccgtttatacaaacatgtttgaatttgacctcacaatggactaggctttgtaggagactgaactcatggtaatgaatattagtaattttggtggaatttttctgtggtaaagaatgaaacaaggaataccaggaggattgggccctaattttccccagaggggtccttcttttaggcctcactttatcttctagcaagacagctgtggtgttagacttctgctccttggcctaaaaaaagctggggccccgaccttcctgggcatgggcgtttgttgatggaaccatggtcagaagaacaaggaaggaggtccatgaggtgggaaatgcacgctcacccgagaaagcatccagcagcaggtcctctgtggccacccagctgcctccatgacccatgagaaacagtagcagaatgcttctagaagagccctcccacctgcctctatcaggcgggatacttgtcatgcatttctcttcagtactggcagaagcccaagcggagaaaacctgactctgtgcaggcagcatggcttggatgttgatctttggaaacaaagaggaggctttcaaaggctgaggggagagctcaggtcatgggattatggaaaggcaattagaggtgttttctagaccaagcccctcttttcatagctgagaaaactacagtttggagagcaaagaagtgagcccaggggatatctaagtgcttaagtgaccccgcacctctcgctccttttgatgagccatgttcgcattttggaaggagaaagggggtgcagaagaggcgtctgatgcaggccctgctgacaggcagtcaagggcatccctcaagtcgatgtagtcaagggccagagctgcaggaaaaatccagcaggcacatctcactggttaggggaaactggcggcttttccgtggtcccgggctcggataatgcatctcagatcaacgaaggataccaaaggcaggtgctttttactcatctgctcccactgactccttcgtccccctccttcctgcttcggacctacttctgatacagtgagggagaaagacaagagtggcaagacagtgtattttctctggaacatagtccatcctcccctcctcacggtctctgcctgagctcagagccccatctgctttcccccagaccctcttgactcggggttgtctgagagcctgcagcattggcatcacctggggcttgttggacatgctgactcttggattccacccaggcctgctgtagcatatcttctactgtaacggaatcgccaggtgatgaatatacacatccaagtgttggtgtgctgccctagaaggtcaggattaacagttggtattttcccgttgtcccaagcacctattctcctttaatccattctgaacatcaactgggttctagtttgaaaacaaaattcagctgtgtctgttctttgcctaaaatccttgcttggcttcacattgcttttttcctatatatcaacaataaacaagtggaatttgaaatttaaagcacaaaaccatttataatagcatgcaagaaattaaatacttaggtaaatctaacaaaatatgcatgagatttatatgaggaaaacgacaaaactgattaaagaagtcaaagaagtcaatggagaaatattccaagttcatggataggaagacttaatatagtcaagatgccggttcttcccaaattcataaatggattcaatgcactcctcataaaaatcccagtgagttgttttttggatacggaaaaactgattctaaagtttatatggaaagggagactgcctggagtagccaacacagtactgaagggcaagagcaaaggaggagaaatgacgctgcctgccttaaagacttaccataaagctacaggcatcaagataggttggcaaaagaacagacagatggatcagttgacagagcagacagcccagaagcagatccacataaaaatatggcctatgaatcttgacaaagaagtaaaggtaatacggtggaggcaagattatcttttcaacaaatggtactgaaacagctggctctccacatgcacacacaaaaaattgaatctaaacatagaccttacacttttcacaaaaattaattcaaaatagatcacaggcttaaatatgagacataaaacttaaaactcctagaagataacataggagaaaatctagatgacctcaggtttgatggtgatgttttagatataatacaaaaggcatggggcatgaaaaaaataattgagaagctgcacttcattaaaattaaacatttctgccctgtgaaagacacttttaagtcattgaaaagagggctgggtgcagtggccgacatctgtaatcccagcactttgggaggccaagacaggcgaatcacctgttgtcaggggttggagaccagcctggccaacatggcataaccccatctctactaaaaatacaaaaattagctggacatggtggtgggtgcctgtaatcccagctacttgggaggctgaggcaggagaatcgcttgaacccgggaggcggaggctgcagcaagctgagatcgcaccatggcactccagcctgggcaacagagtgagactccatctaaaaaaagaaagaaaagaaaagaaaagaaaagccacagactagaggaaaatatttacagagacaatctgataatggaccaaactatacgaagaactcttaaaactcaacagtaagaaaaaagaaaaaaacctgattaaaaaattggccaaaaattttaatagacacctcaccaaagaaaatatgcagatggaaaataagcatatgaaaagatgctccacaccatatgttatcagggaaatgcaaattaaataatgagatcccactgtatacctcttagaatggccccaatccagaatactgacaacaccaagtgctggggaggatgtggagccaccggaactctcatctatggcggggggcagccacattggaaacagtttgacggtgtctttcaaaactcagcataatcttaccatatgatccaacaattgtgctcctcggtatttacacagaggaattgaaacattatgtccacacagaaaccttcacatggaagtttatagcagctttattcatcatggctaaatcttggaagcaacccagatgtccttcagtaggagaatggataactaaactgtggtacatccagacaatgaagtatattcagcactaaaaagaaatgtgctttttcttttcaagctatgaaaagacatggaggaaacttaaatacctgtgactaagtgaaagaagccagtctgaaagctacgtacagtgtgagtccaactgtgtgacattctggaataggcaaaactgtagagatagtaagaagatcattgccagggtagcggggagggagggacgattaggaggagcacaaaggatttttagggccgtgagcctattctgtatggtactgtagcagtagatccatggcaaaatacatttgtccagacctgtgagaatgtacaagagtgaaccctaacgaaggccacagactctgggtgatgaaggagtggtggtgtccgtccatcaagcgtaatgatgcgccactctgtgtgggatgtgatcatgtgggaggctgtgcgtgtgttgggggtgggaggcagagagcacgtgagaaatctctgcatgttcctctccaattttgctgtgaacctaaaacttctctaaaaattaagtcataaattctgactggagcttcattaagtggaagaatgcttttaaagttagatttgggtcatgatgacaaatgttagaaataagtgacctggagtaggaagtggaaggtcatccagcctcacagacacccatgactcccagtgaaaacccacgtcctggctgtcagccgtgtcagccagagccttgactagtgtgtcagcatctaagaaacatataacattgacctaagcaaaagtccagcattctggcctgatcgttgtcttcctgggaactctggtgtgggagctgtggatgcacatgtcctagggacggacatggggtggggcagacatgcatgccagacagacagacacgccagtgtgggctgcacaatggctgagcctgacctggaagctgagagcagtttggaacatgtgtggctgtcctcccgtcatcttctgccctatcagaagatgggcaaattcttctgccctgttgagagtgaacaccctgctttgagaggttgcctagctggggaagcggggacaggacacgtgtctggaagaggacagagtcttgaggcagacacttccctctcctgtgcctcagctctcaccttgatgctccaactttgtggatggcttcctctggacagaaggggtgattcaggttcaaagcctgagaagcgggggcacgtgtagacgctgactgtggcttgacgctgactgctgtcagcaacatgatttctgaggcatgtgctgtgacacggttgtgcatggccccgtctgctgggaagacttctggtggccctcgagctgtgaccaccacccaagactgggcccctgttgtcactgttcctgtcccccagtctccaccccctccccaccgcacgcacctcttctggggcagcagtgttctctcgctggacaccatggctcatgtattcattcattcaacaggcgtttatcaagtgcctgctcttaggcagggtcctgagctgggcctgaggctctgaagggatccaggcagggcagccatgttctgttctccatgagcccctctaggaagggaggatggttagattcatcattatgggagtgtcttggacagaaggcttcaacttagaaaagatctcctggaggaaatgacagagcgtgagaggtgagtggagtttgctgggcaggagggggaaggcagaaggctcacagggcaggagggcagagggcggagcagggctggagtggggctgggggagacagagtgactgaagtgacaggactggagggcctgcaggggcagtgaggagctctccagactgaggagggagagtgagcgtctctgtggccgaggtggacagtggggaggcaagcagggacaggaaggccaacgctgccttccaggaaggagacccagtggggaagcctggcctgtagtgagggctgggggcctgcagagaagggcagtgcctgggggcatatcaggtggagaaccagtgccaaactcacacccctggggacggttgcctctgaacccgctgcccacctcacccccgactttcagatccttctgcacacacttcctctgccagggacaggacaggagcgcaggcagctgcataaaaaggaggccctgcagaccacgccatgtgcttattctgtgcaaaccccaccgtcccaccttccccacagctgactcccatgagcgtgagcacacggaagctctgtattggcaaaaaacactcagctgagcaatgagacagggtgatttatttacaagcatttgagtatttcagttccccccatcaccactcagaaacaaaagtgaaaattgaggccaattgcatgggaaggagcacagcatgcctgagagggccgggtcagagctgtcccatggggactgcaggggccgcctctctgagccccatcagtctgtgtggagagggacccctcaatgaggagatgagtggactcaagagcagacaatggactgggactaagttcctatgggccctgggggaggtagtgacaagttatgggaaggtgaggggtggaagtgcactgtgaacaaaggttgtctaattatgcagattaagtctctcaggtaacagccctttagttgaaagaataggtgaagtctgtcctgggcatggagactttgagttttctctcctatgttaagagttaattttctgtgattaatataaatcctagggaggggagtctaagacaaatgcattccttccagaggaacttccctaggtcagatgagggaccttcagagagagcccacccccatgcttcagaagggaaagagggcaaggaagcaaggtggagagaggccttggttctgagcttatttctgaggcctttcaatctccattgttcaaagcagtcagcatgccagagcaccatatcttggggtgttgttttctgagcgcatgttttcaggacaggttttatccctggtctcaaacccatctctccacagagagaatatattgagccccagtccttttggctcagcatctagccagacctgccacaacacggctctgtagttactgagtttctcactgtgttcttgggctctcagctttaactggtgtgctgagaactgagttctcttccttgaagctcccatctccaagtctagtcctcgatctttgctgtggaaacctttgtgaaacacttgtgctgcccctgcctggacagacccctggacccgggggtcatgtcaggcatcacgcagcagtgtggctgcctgtctgctgtgctaagaaccctgagccttcagccagcatggtgggtgggagccctggggttggtcacatctatcctgagtggggctgaggcatgtgggtgctgtgcctctcttccaggcttctggcccctagtcggcaagctaggatgtgtttgccggatgcttaccaaacgccagatactgtgcgtgttgtatcatttaatcttccccatctctgtgagggtagacgttatctccactttgcagatcagaaaagtgggactcagagaaatgagaccctttcccaagcagctcagacaggaaggtgttgtgggcaggtcttcccaggtcttacccagcagtactcactagcgctccgtctgttctgagcccctccttcctggtcctatgaaggtctctctcctctcagtagcaggccccacattcagctcacttgctctgtctcctgccatctgcttcacagctcaagacccctgggccccctgcttagcttaaccctggtctgtccctttctgacttggcccgtgagatgtctatgttctctttccctccatccagggaaggagcaaaagccccttgccatccctgtgtgacagcaatgaggtgaacccaggggccgaagcccacccagggagttgatggtaagactcaccttcgttttccttcccctcctcagaagtgtggctccttcctctgcattcgctgggtgatgctggggtctgtaggctgagaggagcaggagatccagtggcaaggaagacgaaaacacagagcaggccaggcacgtatttttggattagttttagagaacaagttctaagctgtgctttttatgttgcctttagaaaatgttaaaatactttctaggctgggtgcagtggcttgcgcctgaggcagacgggtcacttaagcccaggagtttgagaccatcctgagtaacatatggggagaccctgtctctacaaaaagtaaaaaaataaaaaaattagctgggttcggtggtgtgccagctactccgagctacttgggaggctgaagtgggagcctctgttgctggagcatcgaggctgcagtgaggtcatggctgcagtgagccatgatcacaccactgcactccagcctgggtgacagtgaaaccctgtctcaaaaaacaagaccaacgaatcactttctatctcactatctgtattcttacagaaattttcttctgtaggaattaaaaagatctgactccccctgcccccacctggagagacaggcactaatgcacatatctgacccagtgccagtatcttccttgatttttcaaatgggtgtcagtaaatgtgaatcgatttggatatttgggggtagatttaaatatccctggtggttatactagcttgcttaagcccacccttggatgcagtcatattattagatgtatttaacatggtagacgatcactctaaaacattagaatataatttgtatttctgcagctcttctgagacttgtagacaggcacgtcacccagtggatgagctctatcacgacaccgtctccctatttggagaaatattctgcagcgtatttactgaccaatatttgctgaatacctgttgtttactaggacttcgctaagtattgggcatccagggatgtgagtggagagtgtcggagctcctgccttccctcggtggacctgagctcctcgtggggaggacctgctttgtgggcctgtgctttgctctccaggtgtctggctggcacagtgctggcataactattactgcttggagctgccccttttccactgaccccacaaagcctctggtaggagtgtagttggtggtagaaacacggagttgggagccaggaaggcctgagtgaggggctcggcctcagccaccaggctgggaaacttggccacgtgccctcgtggctcctgggcctccgcctgcttcctgttgggcatgatgaccctgtctgctctccatgtctgcaggccagggacatgtatagggcatcagttccatggtacggcatgacagtagtgaccatcctcatgctgcttgtggctgctgcccctgctgctctgaacccacttgtagaacagagatgtgccctgctgggcccggggcgtggcctgggatcacctgcccacttgctgtgttctctctgctgggtgcttcagttttagtaacttaataattatccctatatgtcacatagtgccatctgtgtgatagaatttatgtatcaagaacccaggcctaggagcggtggctcacgcctggaatcccagcgacttcagaggctgaggcaagaggatcgcttgagcccaggagtttgaagcttcagtgagccatgatcacgccaccacactccagcctgggcgacagagcaagaccttgtccctaagaaagatgccaggataaataagtattatcactacaaaaaataggaataggaagcatcagctgtggttaaaaatgcaaaagggtaaagctttattcattaactgctttaaagcgggacttttcccttctcttctggtttagctttattcagaagctgcctctgctgaagtagctctgggttactgataattgctcatggttgtggggtgcatccaccatctggaaatatcaagaactgaggattctagaaactggattttaaccccgttctctgctcttcaaacattaatcatgttgggctgcggaacccacataatgaggacgttactgcagacgtagttccctgggatatgtcacattggaggtgattttcttgtgtcaagattattttactacatatttatttttggtttgtgactttcccccttactgaagtaaaacagtttcctttctccaaagagttgggaatgtagcagcttggctaagcatacaaacaaatagcaagttacaatttaaagccatctggaaaggttaccaatgagttttgtcacatgtatagatagtgcataaatcatcatcagaagggaatctggtgatatgtagcagaagccaccagggcctgctccaccagggagaacgcggagcagcagagtcagcggaaggagtgccagtgcgtacacctcctctctgtttacaaagcaaagctgcttgtaagaagtgcgcttgaggaaagagtgcattttacatttcatcacttcatcactctgtttattaaaatctttgttgacttgatatatacattcagaaaagtgcatgtatcaaaagctcactgatttttttatacactggaaacacttgtgtgaaataccactgaaggattcactttaaaatggttgtgtattaatgcaaatttcacctcaacaaacaaaaaaagccccagaactcaagcagccccgcagagcccccttgagctgcattttgttggaagtgtcggggtggaatcaccagggtcaacggtttcccatttccactcccgctggcacgtccgcagacccctgccggtcccacacgcaccccaacgcttgctgtcttctcatttctgctgggtgggtggtagtatgatattgtggctttactttgcatttccttgatgtttaatgaacctgagcaccttttcatatgcttctcaggcatttgaagttttataatagttttaaataggggtcttttttccttacatgaaactttgatgagagtgatcatttcttttttattccccaaccatgatccagttcagaaaacatcaaggaccttgctgcctctccaggaagtgtagcaaaaggcacctgcctgctgtgctggggaagagcagtgggccaggttagccccctgtccctggtgtgctacacttacaggtgggcattgggctgaaggactctctggcccttgctgttgggtcggggatgcagtcagaaaggagcatgaagggcatctgtcccggcagggccatgtggccagaccaggaagggctgctcaaagaagaacaaaggcttctctgccctgatggagatgctgacaccttcagaaagacgtgtttgtggcatcggcgtcatttctttctgtggctaccaaggccgagaacttctctgtgctccacctcatggccagggttcttacagccgcaggccttctgtgtgcattagctagctaacttgtttcttctttcattcatccaataagtatgactaaactcctgcagtatcttcagcatcggcaattccacactaaataagtaaaacccttgccttcacagagatcgaaaacaaacaggaaaactgtaatgtcatgttgggtgtctggagctgtggagagaaatgaagggggccctggagagccatggctgtgccaaggccagggtggcgtcctggagaacctgccttggagtggagtgctggatctggggaggggggagtgctgctgggcatttcatggacacataggcaggaggtgggcaggagcactgagagcaagggggagatgggagagggcaggggcctggtcagggtctcagggccctgggcgaggaatttgaattgcagtccaggtgagagggatgggaaggacaaggctttcagtgagctgcctgggctcttagagagtgaccctggctccctcatggaaaagcagccatctggcccttgagttcagcacctctccaagctccttcctgtccctagactggcagggacttccagggacagccttggccccctttccgctctgccttgccatctcccatcgcttgtcatcgcttctgtgttgggtttgccctctggtcctgttccctagagccatgctctggtcatgagtgttacagggccagggcagggcctgtcaggggaacagagtgcagaccccctctgtgggcccctctgggccctcgcatcccactgccttggagaggagagagcaagatagaaacaggtcctgagatgaggtggcggcatacaagctatctcacacttctgcacccttccaggtgcgtttctgaaatgcatcaatgctgtgagatctacactgacttcagggatgtggcaaaccccctatttcttgtaaccagccagcgacagtcattgtggagccctgcctgtgccccaggcagccctgtgcactaagaaagccaggcctgggagacactgacttgtcgtttgcctccaggcgtttttagttgtaacagactagttcttgtttcccatcacctagaatctgttgatctgtctggatcttagttcctgagcctcctgctctgcaagacgcaccctgcacatgcacgctcacgtggggcacacacacccaggtgcccatcatgccagcaggtgcacagttggagaaatcgactccccagaccagactccccagagcgcggggagcggccaagtgtcctcgcacaaactggggtggaattgatacaggggccagggaggtccctaaacactagtgggaccctgaccctagccagcatccaggctcttgacactgttgtgagaaggatttcaaggatgagtcagaaaacagtgaaagtacaaagatttattgcagagtgaagagtacactcttgcaaaaagaaagtgtgggggcagactcaagagagccacagaatggggtttggggctgctatctttatgggtttctttaaccgaggggtggaatattcatgaaaattcctggaaaaaggtggagatttattggaattgtggtgctacccattctttctttcttttttttttttttgagttggagtttcactcttgttgcccaggctggagtgcaatggttcgatcttggctcaccacaaactctgcctcccaggttcaagcaattctcctgcctcagcctcccaagtagctgggattataggcacacaccaccacacctggctgattttgtattttagtagagacagtgtttctccatgttggtcaggctggtctcgaactcctgacctcaggtgatcctcccacctcggcctcccaaagtgctgggataacaggcatgagccaccgtgcctggcccagtgtcacccattcttacaccaaataagggtgtcctggaactgtcatggtgttggtggtgtgtgattgagtgcgtcagtgagcagataatgaggtccgaggtgagacctagctcaaatccagctctgcactgggtccggtcagtcttagccagcttggtccacaccctgtttttcagggtcagggcctagtcaccctatagcctccagttatatgaaactgttgcctggaatgtgtattcttctgtgaccacctgtattattcctgtcacagaatcgtgacacagcagcagccctttcccagtgtgtggggcacagttacattcctaggtgtggaaggaagacctttgctgcattaaattatccccagcatctgtttgctgcttttaacacgagtgacttaaagggacatgggttagaagaaggagggaggagatttgtgccagggatgaaagaaaatggctaaaagatgaatgaaagttgcatatatctctttttcttctgtaaataactcatgataaaagggaataaaatttaggttttccccacttggaagagacatggccaaacggagtgtgtgcttttcctaaaccaccgtgaaggtagcatgaaaaccaggcttgctcttcagagactaggaggctcctgttttgggcactccatctgccctgctgccgtgaaagctctcggacccaaatggcttcctgtgatccactgtggtctgcttattatattcccttcagctatgtttataactctgtcaacagccacagcgtgagtaccccaatcggataacaataacctaaaattttaaatgctcaaaagtcagaaacattttaagtgacaatatgatgctcaaaggaaatgtccattggagcattttagattcagatttttggattaggaaggtggatgtataatagaataactggtaagtataatgcaagttttcaagatccaaaaaagttcaaaattcgaaacacttctgactccaggcattttggataagggatacccaacctatattatgaagtggtagcaagaaaattacattgaaatggaacattttttcagtttatgtatccttttgtgaggtttttatttcaaaatatcacagtccaagccaaaaaatatacgtgggtgtttcagtttatgaaaactgtaagttatgtttacttttctatatgtatatatttttttacctcaataaaatgatagccccaaactctcttcaaccttacctcatctgtggtttatagacgtttccaggggaagttttttaaaatgatgtgttccagaaaggagtaaatggaatattaaaagcatgcagcatggcccattctggaggagggccaggcttgtcagggagatggcaggatgtgcatttttgcacatccttggctcattggcatggcagggagagtccagctaaagcttctgcaccccctgtcccctttagatctgggcctctgtctctggacgatattctgtatctccagcctgaacctctcagatgttggaaattaacctcagagtgaatcactgggctgccatagggatttagttggacacagtgggtggccaagtcgtctctgctcctcttcatggtagtgggggctgctctctaccatctagacccaccctcatgggaaaggccgcagacccttactcagcctgtgggacaccaggcagagtcccttgcagctgatggtgagctgaggtgcactgtatttctgccacagggatttgttaatgatttactttaaatgtccacctgcagggtagctgggacgatgaaagcatcccaagacctcccttttccatctgtggctgatcacctctggaacccacagctagccggctgctcctccactatcagatggcggctgtcagtcatgggcttgtcaccgagtgcatccgtcatgctcgggccatgggccggcacctgtgtgtgtgtgtccagcttaacgacagagatttttggaaagacgccctaagatagacatacttgaaactgagtgagaataagtttgacttatttctttttgagatactttatatgtttgaaataattaatagctggcgccagtgaatctagtttctgtctgtttcctttaaagattatatgtagtgttggtgattgggatttagtaagctatattgaagatgctaacgtttgattttatagcaaaaaaagaagcatttgtgtggagcaaggacgtttgtatatgagcagtcataaagttaatgtcaagtggcccggcagggacttttacacccattttacaaagaacaagacccagaactagaggccaggaaaacagatcttctgtttctcaccctggtacttttcccatcaggtgacagtgtttgggtctgcaccacgtcaggccaaagctttgcacgttggtgctgtctgataatgaaatttgcagaacaccaccgggaggcttgcatgaattggtgcgaggaaaagtagaggcgcttccatcattcaattgatggatgactatgaggctgactttattgttcctagcactgaaatcctgtttttcttgggtataatgaatacagtagcatggtttatgctaccttcatagagtttttgccccccactgaaaatgcaacttgtcattctctaagatccatgccaccaagacccaagacaccaagacaagaccgattcgggcaagtctagctagaaacaggccacgctcttgtccccagaatggccaggacaccatcaggcctgaggggcacagaggaaggatgcgagtggcctgccacaggactcatccaccccagtgcacggaaaggtgaatcctggatttctcccctattcccgggctgttgatgggatctcatctttgtaaagtttcttctggttccgagttgcctctgccggaagggacgtcctttcacagcccagcattgctgtaatccggtggagtggctgcagtattaacagatggagttggtcctcccttcccccccgggtctgaatctgcctgctcctgtgcgttcactcttcctgcagtccagctggggagtagcagctccttggcaaacaccttcttctccagccccgtagaacgcctggcctcatcaaaaaggccacaggatggccaatgggcattgtcagaccctactcaggagtgggatctccactgactggggcggccctccagcaggtgtcccagggccttagatccctccagagaaatggtagctgctcagaagatggagctctcctggaaactcctgagtcacctgggcagtggggtgccctgggagcaccaggtcatgccataccccccttcctcattttctccatccccacagctccactcttcctgcctttcccttgaaaatgagtgtggcaaatagaggagaacgggctgggtgcagtggctcacacctgtaatcctagcactttgggaggctgaggtgggaggatcgctgtgctaccagcctgggcagcatagcaagaccctgtcttcacaaaaataaaaataacagtagctgggcatggttgtgtgtgcctgtaatcccagcagtttgggaggctgaggcaggaggatcacttgaaaccaggagattgaggctgcagcgagctgtgattgcaccactgtactgcagcttgggtgagagaaagatcttgtcttaaaaaaaaaggagaggatcaaaacacaatcctttatcttctaaacaccttgacatattgcctacagccaagaagttacattgttttcaagcatttaaatgccatttccacaagtctgctcatactgggaaagtgtatgtcctcaccccaaggccaggctgacaccctggttctcctttttagtcgagtgagtctgtctttctttttctatttttttgcatgacagttctatgtaaaacatggtcatgaagggacttgttaaatcatggagtcagcttttagggctagaaaaattgagagaaaatttaccttcaaaaaagtaggttgtggaagcaatgatcactagaaatattttatggaaaaacaaatcatgtttcctcttttgcactgtgcacccctgaggcttccggctttggtgttgctaaggttctgagaagaatgctgttcttagctggtcatcgctttatatgctttggaaatattttccaatatttgaatggcatcgtttcattaaggcataggacaccgtgcctgactggtcacataagagcttttcttctttaagcaaggaaccaagaggggtggagatgaaatgatttttttcctcccatctggggctcagagttggacatggcctctttacttcatccgtggctgggaagaggggcacagaacagcagagggaggcggtcaaagcccagccgtgccgtccctgcctccagccccgtggtccttgtccaggacctcactcagcccgtgggccctctgcttcctcccatctgtgtgcggggccacccagggggtccccgcttctgagaatccctggcagggcccagcatggaggcgtgtggtccaggcatggtgacgcggtgccgcaatcctgccttatggtgtggaggccgccttcctggccatcccacagtgcctcctccttcctgggctcggagcacagctgacagccaacatgacctcgacatgagtttggggagaaggagcagggcggtggtgatggctctgctgagaggaggcatcatggttgacaggtggaaaaggaaggtgcaattaaatattgacattcactgtatcccaacctgctgtctagcttgtctgacacaaaagcatatattcaccgagagaggaaataaaatcttcattcaacttctgcttcaagggacatcagttaagcaaaaaataaaacagcttcaggaaacatattcatttccagcagtctcaggtggagaactgaggaactggagtctagaggctttttcctgatgagttcacactgcaatgtgccaccgaaactctaaagcccttgtctcaagcctacctctgagtttcataaaacaagtcagatatatctgccctcataagacatcttcgcatttgcctgttttatagaaaatatacattgaggctgggcatggtggtgcacacctgtaattgctgcagtttggaaagctgaggtgggaggatcccttgagccccaggagactaaggctgcagtgagaaatgattgcaccactgcactccagcctggagacagacatatttaataatataatatattattaaaaatatgtatattcagtgtatatatacacatacacattgaataaatgacacagtgggaattaaggaagtttgggtgcccctagcgcctcccaggatgaaggctttatcaatgaattactaaatgattgttcacgaagtcttcaacaatggtcatttgtaattcaccctctcttcctatatgtgtggtccttcaaggccgctttttcctgttgttacactagtgagagggaaccgaacgggctcatattcagcttaaggcacaagcgaaccccgtttgccttcaaccctgagacccgcctcccagcttggcagttagggtggcccttaaggtctcatttggcatcaaggagagatttccagtctgccaagttttcacagtgagtgaatcattgtctgagaaaatgacctctgaatatacatatatgggactattcagaagggctatgcagcaggattcagaggaaagactattaaaattccagtgtacaccagtaaatctacagtttcatcataaattacaatcaggaatcattttgtctcatggcctcgctccctgcgtggggaggtggtttcagttccagggccagcgaggcgaatacggtgcggggagggctctgagaaaggaacagaacccaaatcactttccttctttagttgacgaatctcagggcttaaaatgctacaaacaattgagattgtaaatgtatctcgtctgtttctctgagcctgccttcagtcaacaaatgttttctattcaccagcctaagaagcagctttggtgctgtcccttgcgggatcccacttagttatcttttagaggaaataccaaggcatatttcccccattcctgaagtataagatggtgtcactaatactgtggcttagtaaaatgggaagaaatacactgaggattctgaaatcttccctcagctgccttgaagaattgggtcaataacctttagagtggtgaagatggctcaggaatagattaatagactcacaaattctagaacaagagaagacttcaaaggtcgtagggcccagccctgtcttttggaagtcgagttactaattttgtactgagatggcgactgaaactcggaggattgtttctctgcctggatcatacggcaacgtcaccagcactgccactgcgcagtgttcagagagcgcgaagacctccatcaccttctagctcagtcgggtcgcctcggcctccagctgccgggcccttgtggagtttcttcccacggatttttcatcctccccagctccccaggccccttctaaaccctgtaatacactgcaggttcttctggcgctcccaccacccgcctggcctcccttctctgcctcgaggagatttggctgcgtatagaggaacagggaaggtgagtatgcaggggacaggtaccagctgtttgccatgggtaccagtgagggcacaggaggaagtgagtgctgtggtggctttggagattaggttaatcataaggaaataaatcctgagtcgtggagactgtcaggaaatcgtgtgcgttgttcaggaagatggtggagtctgttcctctggaaacacaaaacatccaccttaaaaatgtggcggccttacttgcccagaacaattttagtggggtctggcctgaagtcagggggtggattagatgaccccagtctcttcttgattctattaaaagattttcaggggatgaggtttctacaggcaatagcacagtctaatgcttaacaaatcttttgttgaagatttttaataccatcttttcatctgacctaaatctttcgtgtggaagttgagccatgtcccctgtggagaggaagaacggaggagatcgaaattcagcctttaaagtacccagttaaatttagtgtttcgaattagggagactcaagcatcagcaccgaactgggtcacgtcatttgatgttttccgagaggaggacaccacagaaatctgactcttggttctggtatcagagtcaaagtcccccatactcgaggttaataaagggattgggaggtgggagggaaagggtgtgatttcaaggtttgtggcagttaccacaaaaccactgcattaatgcaaaccagaattaaaaccacatagtataaaatgtcatgcccacacgtctatttgtccagcaaatctcaaggcagccagcccgaacctgggcaccccagtggacttgaagacaggtgaagccaagcaacctcagaatgagaacttccccattaataacctttaaacatgacctttcattagcttaacaaaacctaagaaatgcgcatgtattcaagaaaagcagtaagtaagatgaattactgtgttttaagccataatgttcaattaattagtaatttccatccagcctgctgcctgactcataatgagcattctctagtctaaataaagtggagactgcttagttacagagcattttatttagcttccttttatttcaacttaaagaagggttctttttattttttagagatggggtctcactctctcacccaggctggagtgcagtgatcacagctccctgcagtcttgacttcctgggctcaagcaatcctcctgcctcagcctccggaatagctgggactaccgggacatgccaccatgcctagctaatttgtttgttttttttgtagagacaaggtctcactatgttgcccaggctggtcatgaactcctggcctcaagtgatcctcctgcctcggcctcccaaagtgctgggattataggcctgagccactgggcctggcaaaagggtggctcttgtagtgttttttttttttccttcttttttcacatgcctgctgtgtcagtcttgtaatgtttttaaaaggctgactactgtgtatttttaaccctttttaattattaccatttttcagaagtagttcactaagactttgtaagaaggtgcaagtggctttcatgccataataccaggtcaaaacacatatgggggagccttaattttcttttatgtgaggaaagccctccctttggggaggaaagaaggctgacttctgaaagccaaagctacaatgggaagaaacactttgttagctgggagtgaggagccagcgaaaacgacaccagagaatccttcttcccacacacgtcccgccgtggacactggagaatccctcttgccacacgtgtcccactgtggacactggagaatccttctgcccacacacgtcccgccatggacactggagaatccttctcgccatacacgtcctgctgtggacactggagaatccttctgcccacacaagtcctgccgtggacactggagaatccttctccacacacgtcccgccatggacactggagaatccttctcgccatacacgtcctgctgtggacactggagaatccttctgcccacacaagtcctgccatggacactggagaatccttctcgccacacacgtccctctgtggacactggagaatccttctccacacacacgtcctgccgtggacactggagaatccttctccacacacacgtcctgccgtggacactggagaatccttttccacacacacgtcccactgtggacactggagaatccttctgcccacacacgtcctgccgtggacactggagaatccttctccccacacacatcccgccgtggacactggagaatcctccccacatacgtccccagccatagacactggagaatccttctcgccacacacatcccgccgtggacactggagaatccttttccacacacacgtcccgccgtggacactggagaatccttcttgacacacgtgtcccactgtggacactggagaatccttctcgccacacacgtcccactgtggacactggagaatccttctccccacacacgtcctgctgtggacactggagaatccttcttgccacacgtgtcccactgtggacactggagaatccttttccccacacacgtcctgctgtggacactggagaatccttcttgccacacgtgtcccactgtggacactggagaatccttctgcccacacacatcccgccgtggacactggagaatccttctccccacacacgtcccgccgtggacactggagaatcctccccacacatgtccccagccgtagacactggagaatccttctcgccacacacgtcccgccgtggacactggagaatccttctcgccacacacgtcccaccgtggacaccggagaatccttctcgccatacatgtcctgctgtggacactggagaatccatctccacacacgtcccgccgtggacactggagaatccttcttgccacacacgtcctgccgtggacaccggagaatccttctcgccatacacatcccgccgtggacactggagaatccttctcaccacacacgtcccgccgtggactctggagaatccttctactcacacacacgtcgcgccgtggacactggagaatccttctactcacacacatcccgctgtggatactggagaatccttctcgccacacacttcccaccgtggacactggagaatccttctcgccacacacgtcctttcgtggacactggagaatccttctactcacacacgtcccgccatggatactggagaatccttgccacacacgtcctgccgtggacactggagaatccttctcgccacacacttcccaccatggacactggagaatccttctcgccacacacgtcctgccgtggacactggagaatccttctactcacacacgtcccgccgtggatactggagaatccttcttgccacacacgtcccgccgtggacactggagaatccttctcgccacacacttcccaccgtggacactggagaatccttctcgccacacacatcctgccgtggacactggagaatccttctactcacacacgtcccgctgtggatactggagaatccttctcgccgcacacgtcctgccatggacaccggagaatccatctccacacatgtcccgccgtggacactggagaatcctttttgccacacacgtccagccgtggacactggagaatccatctccacacacgtatcctgctgtggacactggagaatccttctgcccacacacgtcctgctgtgaaaacctccacgctccctttccgtttttgctctcagctgtccttccagtatgctgcttgggtcaagcagccgcatctccactgtcctaatgacaaaagacaccagcactgtctcacttcctttcctcctcctctccagagtgttaccttcctgattgacagggactttcggttttctatttagaagcacatgtttggtgcagacatgttgtccaagacttgacattgggaaatgttgggaataatctgaaactccttacaatgtgatgttttggtgattaaaaaaaaatgtttaggaaaggttgctaggctttaaaaatatatatattttgctaacctcatggagtcactgtgcagaccctctcagcagctagccaggctggcctggccctgacggcccgggaatagcagctgtcttgtgacttcccacagcaggcacattgcgtcgtctctcaaagtccctcctctggagcgcctcctctgcccgtggggctgtgcgggacagtggccgcgtctctgtctcattgcaggacagcactgggtcttaggtgctttttcatgttgtccacacctaacgctgctgctccccggggcccagttttgaaactgccctttggcatcatgctttcccgcccctcctgggagcagcgcctgtgggagggcagcgttattcccagctcctcagagaggagaccacatccatggcagtgtgtgactgtccctttcggcggtcctttgtgaagcccgcgggaagttctgcattcagttcctgactcccagaaaaacgtcctgtcttttgaactgaaaggaggctgatgtcagagcctcgttgagtaacaatggagaaaatctacatcagaggaaagaagccctgagctgctttaaatgcttctgtaagatgatatgccacaacacgaatgtggattgttgacagtaaccacagagacgagatcatcgagggaaccagctgggagtttgtgaggccataaaacacatcatcaaaaatatggtgaagcaaattcagaattggtttttagaaaggagaaggaaccattggcaatctgacccataaattattctacattttcaaatattataactaggaaggtcgcttcaaggagccttcaagcccctcatgcccacccgccccaaacccattgtcactgctaggtcccagatttacagccacctggagaggaagttgcagggggtctctgtgcagctgaggatgatggaagggattgcagaaggctggtgctgtaactgttgttagcgggagattgaggccggggggtggagtaggggctactttcttccccctgcacctgctatcatgatttcagcaaaaccttgcctttctcctcttcaatcttaaataggtacagtggctgagtattaatattaatgagcataataacaataataaaactggcagtagcatcaaatgaatgtggtctcctgcagtagaaatatttacccgatgtgtcctgccagtgagagagattttggcattaaacctagacattacctcatcctcctgggcagacagccgattgccatgctaagcaagtctgcgccgagaagagctgagtacctgccgacggctgcatggcccagaccccagggaacacagtttccttgagcctgtctgtctgtctgtctgtctgggtctcacccttaattcctttctttctctttccctcctccggaggttggcattgtgtattttcaaattgtgttgctttttttttttgcagaatcttgtagggtgtgttgtgaaaagtctgccagccaggtgggtgggtattattaataatccatagaaacccaaggggtccggagtgagaggagaaacatgacgtgcctgtgtgtgcacaggacgcctgacactcgctcacacacgcatgtccctctctctgagagccagggaatggggtgggggttggtttggtttaatgcatgataaaaacaggggcattctgtaataacagagctttcatttcaagattcttaacaactaaaataatattttgaaacatttggaattgtactagaaatgtgtgtttgatatgttcaacctaagaaaacatcacacttaaaatgcttttactccactggcttcagacctctttgaaattggtgcctacacagctgagaagtccgggtaggtgccgtaggcaaattgaggggagaaagtgacatcttgtgtaacgctgcaaattcgcggaaggctttgaaccgtcaccagagtagcaaatactcattgtgaaagtttttgcaatgaggtacggaaaaccatttcagctgctctgattgtcagctctcctgtgttttctttagctcctgacttaaagttacgtgtcctgtcagttttgatactcttactacttagtgctttaggttttatcagctggtgccacatcttttaaaattctgtcccactagcctctgtgctggtcctgaccgattcaccagctcttgggactgtgtccagatgccttttgtgatgcctcttttctaaaatgcttttatttgggtttaagatgtactaattctttcacacacccatagctgaataccaaatattggtatgcatactaccaaacttttgtgtatgaagttcgtacaaggcactaagtcatttaaaacattttaattgtgtgctgagctcgtaagtgtacaatatgactgtctagtaaattcttaattatttgtcgactctttatcgaagaaaaaagtaagtaggggaaaagataaaggagcatccagccggtggcaaaggaacaagccgtgtagctctgcttctcacccactctcagctagcttgggccacggctgcctgaagtgacaccaaacaggaaccccactgggaggactgtacgggccacacccatggacgtgatctgtctatgaaacaggtcttctcagtgcttcggggtgaattttgacttctcctgagccatcctcagagcacagctggtggggaacttcacccgtctggtcactcctgaagcagtctggctggcagccacaggctgggatcccagttgttggaggtcagtgcacacagcggctatctgctgtagcagaaagaatttaggggaggaaaggcttgagaaggaagggcaagagagagcagactttgtggcatcagtcaggtatatgtgcttgtattaacatgaacctgagaggctgatggtattacatggaattccaagtttcgactgcatgaattctgtctcttgtggtttatctatggccaccatcaaccgatgttgtgtgataaaacgtttaaagtatgtacaactgaaagtggagatggatactaggggcatttaacgttttaagctttcctccagggttttttcctcagttacatggaggatggccctaggtactaactgttggaaatggcagcattgaaaagtgcagcactttctgcttcagcagcatctcaattctgcgcagcctttgaaaatccttttctacagatagcaggcaacctgccattgttcccagccggcagcgtggtccctgccaccaggtgcttgaacaaacggccatgtgtatgagggtcccttctcctaagtaaaattaccctaaagactctaaacgagaatggagactttgaaaaaaatcttctgtatttttctattttaattatcaagtaggggaaacagatctgaaggggaaagaggagagaggaccagaagggggcttccttgctgtgcaggagacctgtggatccagtggaaagcagccccatgtgagatgaaattatcacaggggcgggatgtgccagaggggaagcaggcagcccaggcatgtgtgcgtggatgtggagcccctttctgaagtgagtttggttttattttgggcaggcctcataggctgtacatctggcaggagatgagaaaggaaagactggctcttgttttaaaaaaaaaaactaagtaaaaaataattatttaaaaatgactcaaaagaaataattatgagactagttatgatagagtaaaatgatttgttcattttccagattttaggtaacatggatatactatatttaaagatttatttttttaataacattactaatgataggcaaggctcatatagtacataatacatgccaggcgctttgtagaaatgaactcatgtagtcctcctcacagctctataaagttagcataattaccgtctccaccctagagctgagggagagaggctcacgcaggtcacatatctcgccttgaatcacacaagtggtaagcagtggagccaagaactgagctgggcaatctggccccagagtccgttcgctgacccccatgctacaccccctctcaaaaacagagacttggacaccagatccaaattcaaacaagacagttccctgcttttatcaacctaaagcattactaatgggttgctccggttcacaggtgtggcattcacagtggcattctccagatgaagaccatggcttttaagacaagtgtccacggtctgcagatgaacagttgcaaactcagagagaactaagccatctagaatattgcattcattctatatttttatttttattttattttgtgtttttgagacagagtctcactctgtcacccaggctggagtgcagtggcacgatctcagctcactgcaacctctgcgtcgggggttcaagcgattctcctgcctcagcctcccgagtagctgggattacaggcatgcgctatcacgcctggctaatttttgtacttttagtagagatggggtttcactatgttggccaggctggacccaaactcctcacctcaggtgatctgcctgcttcggctacccaaagtgctgggattacaggcatgaaagaaccaccccacttggccattctgtatttttagaatacacactttctcttccgagagaggcatgggtgtggcttatactgccagctgttggttgataaccctgtgccgccattcccacagacatgccccactattgtccttgctgtttgtgatggattctgatttgggaatatccacccttagtaagaagcttcaccttcccactagaggacacatgcaccgacgaggggtggatggagagggtggcttgagtctggagacctggaatccagcactgccatgaggatggggacggggatggggatctcaggggttgccatccattgtccccacaccagacgatgtgccagcattgtccctggcatgctgtgggggctctaagagatggtgattccttctgaataaggaaatataaaaatgtctcttaattcccctaggcagtaggagctggttacccacaagcgaagcctcagttagattctcccagcagagaaaaggagatcttcaggctagtcccaataggaacagaactaagcagaagaactttgtacttggatgctggagatgatactgcgtatctaatgctcacgactctcactttgcacagtaatgtgggaccataaaaatggccctgtgaattgaaaccatgcaaagtgatgttaatagcaggaaaaattataattgctgccctgacctttaagcatatttttggtcacagcattaaaaacttttctaccatcaattgtaaatgcatagggaaatggcaagtgatagtagaactggtatttacttagcatactaataatttaaaacactagtgaccttgccaggcacggtggctcacgcctgtaatcccagcactttgggaggccgaggcgggcggatcacaaggtcaggagattgagaccatcctggctagcacggtgaaactcatctctactaaaaatacaaaatattacccgggcgtggtggtgggcacctgtagtcgcagctactcgggaggctgagggaggagaatggcatgaacctgggaggcggagcttgcagtgagccgagatcgcaccactgcattccagtctgggcgacagagcaagactctgtctcaaaaaaacaaaaacaaaaacaaaaacaaaacactagcaaccttgagaatggaagcatgctgtttcttggtgagactgatccctagtggtctgagcggtgccacctcctctcatcctgtcacccgcagtgtggggtgagcagagcagccttcctgcactgcacgagctgtcacactccctcctcagtgtggatccacttcccacttgttctcctgtgtgctctcagcgttgtaaagtatctccaagagtttctttaatgtgaacttgtttcctggcattgcttcctccaggccgtctttgtcccgttccttatagccactttcctcctaagctcaccttcccctgggcgtgacaggagtctcactgcagcctggccaccaacctgcgagcagctgtttcctcttttttttttttattattatactttaagttctagggtacatgtgcataacgtgcagttttgttacatatgtgtacatgtgccatgttggtgtgccgcacccattaactcgtcatttacattaggtatatctcctaatgccatccctccccctccccccaccccagctgtttcttttataactccgtttacggtaggcttgaatttcacttccagcaggactttttatttctttgctgcacttttaactttgttggtggttttcctcttttgatgacccgtttttataaacatcacatacatttacccctgggtgacagggaccaacacagctacatactttgcattctgtacatgaaaaacagcaggttatccagaagctctagctaagatcactgatgaaggtggctgcactaaacaacagattttcactgtagatggaatagccctctattggaagaagatgccatgtaggattttcatagctggagaggtcaatgcctggcctcacagcttcaaaggacaggctaaatttctcattaggggctaatgcagctggtgactttaaattggcatggtaaccagttgccaacagactttgagagaagtgacctgcttggtcactgaccatggcactcatctgtcatttgcatggtgatctgcatggcagaagtgctagctgtgaagtctgcagtttcggcgctgacagtgactctatacaggagtacctcgctttactgtgcttcacagataccgtgttttttacaagttgaaagtgtatggcaacctcacatggagcaagtctctcagtgccatcttctcagtagcatgggtgcatttcatgtatctgtgccacattttggcaattcttgtgatattttcaacttcttattatatgttatggtgatctgtgacagtgatcttttttaaaattctttttaattttaatttttaaaatgtttatttcaataggttttttggggaacaggtggttttggttacatggataagttctttagtggtgatttctgaaatttgggtgcacccatcacccgagcagtgtatgctgtacccgatatttagtcttttatctcttaccctcctcccaacttccccgcgaagtccccatagtccattatatcattcttatgcctttgcatcttcatagcttagctcccacttataagtgagaacatatgatacttagtttttcattcctgagatactccacttggaacaatagcctccatccaagttgctgcaaaagacattatttcattcctttgtatgattgagtagtattccatggtgtgtatatctaccacattttctttatcccctcattggtcagtgagcacttaggttggctccatatctttgcaattgtgaattgtgctgctataaacatgcatgcatatgtgatacagtgatctttgatgttactattgtagttgttttggggcaccacaaaccatacccatataagacagtgaacttagtgttgtgtgtgttctgactgctccactagctgttccgtcacttctcttcctttccttgggcccctctaattctccaagacacaagaatattgaaattaggacaaataataaccctaccgtggcctctatgtgttcaagtggaaggaagagttgcacatctctcactttaagtcaaaagttcaagatgattaaacttagtgaggaaggcaggttgaaagcctggtagtctgaaagctaggcctctcatgccaaacagttagccaagttatgaatgcaaaggaaaagttcttgaaggaaattaaaagtgctactccagtgaacacacaaatgataagaaagcaaaacagcctcattgttgacatgaagaaagtttaagtggtctggatagaaggtcaaaccagccacaacattcccttaagacaaagcctaatccagagcaagatcctaactcacttcaattctatgaaggctgagagaggtgaggaagctgcaggagaaaagttggaagctagcagaggtaggttcatgaggttcaatgaaagaaaacatctacataccatcaaagtgcagggtaaagcagcaagtgctggggtagaagctgcagcaggttatccagaagctctagctaagatcactgatgaaggtggctgcactaaataacagattttcagtgtaggtggaataaccctctattggaaggagatgccatgtagggttttcatagctggagaggtcaatgcctggcctcaaagcttcaaaggacaggctaaatttctcactaggggctaatgcagctggagactttaaattgcagccaatgctcatttcccattccaaaaatcctagggtcctaaagaatcatgctaaatctatgctgcctgtgctctagaaatagaacaacaaaactggatgacagcagatctaaaatagatccatagatgtatttttagcccactgttgagacctactgctcaggaaaaaaaaagattcctttcaaagtattactgctcattaataatgcacctggtcaccaagagctctgatagagacctacagagaggttaatgttattttcatgcctgctaacacaacatccactctgtagcccatggattgaggagcaatttttacttttaagtcttattctttaagaaataaatttcctaagggtatagctgctataaatagtgatccttctgatggatctgggcaaagtaaattgaaaaccttctgaaaaggattcctcattctagatgccattaagaacattcatgactcatgagaaaaggtcaaaatatcagcatcggccaggcacagtggctcatgcctgtaattccagcactttaggaagctgaggctggaggatcacctgagcccaggagttcaagactagcctttggcaacacagggagacatcatctgtacacaaaatttaaaacaaaaacaaaaacagccaggcatcatggtgtgcacctatggtgccagctgctcaggaggctgaagtgggaagatcaattatgcctaggaggtcgagactggagtcagccatgatcatgccactgcactccagccttgacaacaaagcaaaaccctgtctcaaagacagcaacaaaaacacaacaggtatttggaagaattgggttccacccctcctggatgactctgagggatttaagacttcagtgaggaactaactgcaaataaggtagaaatagcaagagaactaaaattagaagtggagcctgaagatgtgactgaattgctgcaacctcatgatcaaacttgagtggataaggagttgcttcttatggataagcaaagtaagtggtttcctgagataaaatctactcctggtgaaaatgctgtgaatattgttgaaatgacaacaaaggattagaatatttcataaacttagttgttaaagcattggtagagcttgagaggattgacttcaattttgaaagaagttctgctgtggatcaaatgctatcaaatagcattgcatgtacagagaaatcttttgtcaaaggaagagtcaatcaatgaggcactcttcattgttttcttattttaagaaattgccacagctaccccagccttcagcaaccaccactgtgatcattcagcagccgtcaacattgaggcaagaccctccaccagcaaaaagattacaacacaatgaaggctcaggtgatcattagcactttttagcaatgaagtgtctttgatttaaggtatgtaccttttttagacgtaatgctgtcacacgctagagagactacagtatggtggaaacctaacttttatatgcactgggaagccgaaatatctgtgtgactcactttgttgcaatattcactttattttggcggcctggaactgaatctgcagcatctccgagtatgtctgtgttgtagtaactgaaatgtgaaccgtattgttcagaggcaggtgttatttaactaaatcatgggaactgagatgtttttgtatctgaactgcgtaaagtggggatagcctctccgtggttagatctagaatggaagaggtaatatgtttttgtgggaatggggacctatgattttagctaaatcccaggagtcagcttggagactttctgcatgtcatgcagcctcctggggcctcagtttctcttctgtacaaggctgaataaccttcacaaagtctcttctagctctaaaactatttggttctatgatgcaggagtcctttagagagagttccaaagagaggcataaataattattagaaatcatctttgatataatggactttggagagttggggggaatgttgggagggggcgaggggtaaaagactacatattgggtacagtgtacactgcttgtgtgatgggtgcactaaaatccagaattcatgactatagaacccacccaagtgattaaaaccacttataccccaaaagtattgaaataaaaaaatcatctttaaaaatatgaggaaaggcaaagtcagttgggttggcctttctggtgcagaatgacagtgtcaacacctgttaagtttcccagccagggctggtgatggactgtctgtctccacggcagagtatggaagcagagaggcactacctggggcagagggagatacggctgaaagcatggagaggattaatgtggctggggtgaggagtgagagggaaacttcaacacaaaacaaaacaggaagatagtggagatggtgctccagtgatctttttatctgcttggaaaaaaatggaattaaattcagatcttccaaagaaaagctaatacatgtaagttaggaaaacggcagtgatttctgggagcaacattcttcaagcctggattagttcacccatagaagtcatggaactcatgtcctcacacacaggatctgtgaggagcggcccaagtgcagcctgcagaaggaagaggagaaaactggacctgctcagaaggcctctgtccactgagctttagatcctgtttctgaaaagggaaggcaaaatgtgctcaaaaagaaatcacacagggccgggcacagtggctcactcctgtaatcccagcactttgggaggctgaggcgggcggatcatgaggtcaggcgttcaagaccagccatctctactaaaaatacaaaaattagccgggcatggtctcgcacacctgtaatcccagctactgaggaggctgaggcaggagaattgctcaaagccgggaggaggaggttgtagtgagccgagatcgtgccactgcactccagcctgggtgacagagtgagactccgtctcaaaataaataaatagtcacacaggttatcagtgtactattaatagaaaatgggcatattctttgaaaattatgggtaaagaaaggaaatatatgacatgaattctgtaatcgttttctgataggtagaaatttccctcaaggactgacttgaatggacggggatgagaaagacagtgattgtttctggcccctcagtaggaaaggcggggacatgggtacaggtgccggaacagccccagcattggttctccctcgggcgtgctgggccaagaaacgttggctctcaggaataaaaatccccagacctaaaacaaagagaagaccttggcctcctctctgtttgctcagcttaatgcccccaaatcagactgtatgaggaaacacacaagaaatgtatttttagcgtcactggcatggggcatgttctggggaccagaaagatgtacaacatctgggatgtatgtaccatgacagctgatgtatgtagtcgacatttctttatgcatagaaattaagtttctaacaaggagcgcttgcgttgctccgtttatctaaatcaggttggaaggcaaaatatcgtgttttgtttttaaatgtaatttccttcctgttccttttcatggttgtgtctcatgctgggcctacagggtagatataggctgagtaagaaaatgtggccatattttagctatgccattattttaacccctcagccacacatctgctgtggcatgaagtacctgactgaaataaacctccaccagagtcatgatacaggaatgatcttcctaaaaccctacataactatagccactcagtcatctgtggcctcctttcctttggggacaactttgtaagaaaataatctcaaaacaggaacatcccttgtggttttgtgaggtgctcgccatgagcttctggagtggaaaaggttgtgtgcttacaatgtgggtgttgagttcttttcaaaccttaatgcttttggacatatattatgttcctaatagttttgctgctcttgatgttcacattctggattcttacttccttagattcattgagtaattttatgtagttcacagttcctaggttaaatggacttgatcaattcttccttgagctttagagaactaatgactactgcatttaatttgagaaaattagagattgatttttccaggtattctgcctcctccctcctctaactctaactgcatttatgtttaactttaaaatttacacccatatttttgggataactaggttccgatactgtcctgggtattactggtcaaattccagttggctgtaatatgttgggatttcacattttgcttgaaaataaatttggcagtggagatcacttgcactgaaaagtaaatttttttggcttattttatacgttaccctatcctgtcttctctcactgccttttggacttcggagattgtctctgaattatcaaatgatagtgcagtggatgaagtttggccacagatgctagttgctcagcagcagttcctttaaacgaataagggtctaaactgcccagagggccagcaccagaacagggtcttgcacattacataagctccataagtgtgcacagtctgatgatcatgtcatccagcctgccctacattgcagtttgctttgttctgggtggcacttgccccggggtcacagagctgccctgacaggtgacagagcctggccagccctcactgtaatacactctgcacccttcctgtctccaggcttacagacagcctagtaacggtttctgtaatctgagctgtctgctgcttcagaacacatttagagatcagtaagcaagtcacattttccgtgttaaccactgtgggctaaacacaagatgtttttgtgggtgggcaactttgtgtctccatggacattttttggccatacttatatagttaagaagttattaaattacatgtgtttttcccttcttttgttagggaaaatgcaaacttcaggagcttcagatcttcttcttggggatcccgtggggagctggatcctcagatatttaggagcggacaggtcctcacaggcttccaccttcatcgtcttcatcagtctccgtttattgtgagctttcagagcttatgctgaattttcttgctatgttcaaatcaccagggccccaagccttggacctatgttgggctttgatttcatgagagcgtgttagaggttactcatggaacacctgtcaggccaaggtaaaagtgtataaggtgggtcctaccctggcacacttagcctgtctttttaagcttgaaacatttaaaagtatttagagatcttgttgatgaagactctgattcaaagtcagaacttggagaaattcagatagacatcctgagaattttcagcagaaagtaatataggctttttcagctagaagggccatagctcaccattgtggatcaattcagggaactggggtgctggagaaagcatgatccatacagtcccaacagacttttgcctcttgccaggaagttggagagattggagattattgttgttgtatttcatgtgtactttgtcgtatatgttaactcttgtactaacttctagtaaactgtatataggtctcattccataataggggcccacccattttcaaagaatccataataactcgtggagggctgaagtcctgggttgtatcctgactctctctgtgaactgtgaccttggaagagtaaaccgtttctttaaacctcagtttcctcctctctacaatgagataataaaccaatttcacataattactgtgggaattagatgaatacaaataaatcacctagcacagtgtctagcatataataaatatacaacagatatcgattccatttataaagcttccttcctccatttataaagctaagagttaaataacccattctcgtataattgaccatggatatccgagtcaggtgggcctcgctgacaggtgagccaggattctagggccaaatagagacagacgaggtaatgggaaaggctgacatcataggccgtggtagccctctctggggactacttgttaacactgtcttaagactatttaaattccatatttgtgtctatgtgtatatttatttaaagaagccgtgggttcgcttggtcttgtaacttccaccttggacagctgtgtctctgagctaatcccaggatcacaggcttaatgcaatgcagcttgatgagctaagctcatgcagaagccctggtgaaacccaggctggtgttgctgcccagcctctgcaaacatcctggtgcacaggtgagagttgtaggttcaacgtctctgctcaaacccaccctacactatttgtaggtgagcaagccattgacagaggctctttcaagccctggactgtaacatctctccatgctttcactgaaaggcatgtttgcccacccccacccccacattaccactgtgggcaaagcatggaaggtatttaggtgggtgggcaactttttttctttgtggacattttgctatatttaaatggttgtgaagtaactgaattacataactgttaaagggtcagcctttagagaagacaaatgtaagcggtggagcatatggtctcgataggcttgggttctgttcgtctcccgaataggccttccttgtgcacaacactggcgtgcattctttcttctgcctgcctctgttattacattggttttaaagaaaccaaaatccttggtgagctgcctgtaggcatgagggaaggaaggatgagtatttctgactttgctttttgaaaagcttccaaatgtggagcaaagaacaggagacaaacaaggagtggtggtggttcttgcatgtcactttgaatgtaactttgaagccaggttgtcctagatggcttatggttataggacagttgtcttaaaaaacaaaaactaaaactacagcacatagacaccaacacagatgagcaaatgctaaattgtcatgtaatgcaagtgactgatcagatgtatagcactggtgaaaggttcctgctgttttgccagcctcttgaaggaatctcagtagacttacaaattcacgtttatgtttcatcatttaacaatggttctttattttacctttttaaggacctaataaataagtcagacaatgacacaagatttggagagctgaaacatttctaaattatattacgatcactactgcttgaggtatttatttgcattttatggggaatttcttaagcaacctgaaattttttgttttgtttcgtttcattttgttttgagtcagtgtctttctttgtcgcccaggctggagtgcaacctggagtgccacaattatagctgactgcagctttgaattcctgggctcaagggatcctcccacctcagcttcccaagtagctgcgactacaggcacatgccaccatgcttggctaattaaaaatttttttttgtagagacgggaccttaccatgttgctcagactggtcttgaactcctggcctcaagtgatccacccaccttggcctcccaaagcactgggattacaggcctgagccattgcactcggcctaagctgaaatgttttggttcctaaaagtgtccatgtgtaagaaaaaagaactgtaggtctttggaccatatcaaggttttatttacatatccccctcttccctacacccaaaattgaatgtagaaaaagtgagggtgttgcaaatacaagtgacagtaacaaacttcgaatgaggttgaacctttacagcagcagtgaagccatgaacgatctcttccgggtgtcctagaggagccctcgtgccttacaggaagttctagccctgtgcagccaacacacacctgtatttgttcagatgtcaccttggtggcacagtacagatccaggggacacctgtgcctctgaggccgtcggggagggtgtgctgtggagagacctgaggactctggtagcgccctccttcacaaatgtgtgtacatcgtgtggctctttattgctagggtggcatttgaaatttcgtttatttctaaaaaccaacagagcggcacttcaagtggacactatttttgattcagggatcagtgtctgagagcatcagtgtatttcaatcctaaaaagttttataaattctgtataaggtcatataaaggtgtttaggtttgttaccctggataatggcgattcatttggagaagaagcctttcacgatgcttcctgacggcaccttctttgaaggagagtggccttatatcagcctgtgttccttaggcagctggcatcccttcatttcattttgttcctttatttattttgagacagggtcttgctctgttccccaggctggagtgcagtggcacaatcctagatcactgcagcctcgaactcctaacctcaagtgatctttccgcctcagcttctcgaatatctgggactacaggcacatgctgccacacccggctaattgtttgatttttctgcagagacagagtctggctgtgttgcctaggttggccttgaactcctggactcaagcgatcctcccgccttggcctcccaaagtgccaggattacagatgtgagccactgcacctggcctggcatctcttttaaaaatggcttattaaatattgagttgatataagcaaatatgtataacctatgtgtgaggtattaagaatcatcaattccagtggatgcttatgtccccactacccagttccagcagaagaatgttcctgtcatcttccacttcccttacacagacacatcttctttctctaactggatgactccccatgtgggacaactgcctgcacgatacacatgagtaatgatgtggttttccctccacaaggtcccgaggaaccagaggtagctccgttttggaaagagcttcctggttgcccatgggttatgaagtctgctggtgaggcttccttagatgtctgaatgtctctggtggccatctgtaagatgcagtcagtcactgtgttcagggagggcggcccgtggatgcctggcttccacacaagcagtgtggtcctggaggcacacgtggggttcctggaaggagtgcagtttgcagttgttgaagccccacaggtgggagaatatttcgctctagctacctctaggtctttatatgacatactgttcttataatatgtctggacatgactttctttttttttgtttgtttttgagatggagtctcgctctgtcgcccaggctggagtgcagtggtgcgatctcagctcactgcaagctctgcctcccgggctcatgccattctcctgcctcagcctccctagtagctgggactacaggcgcccgccaccacgcctggctaattttttatatttttggtagagatggggtttcgctgtgttaggatggtctcgatctcctgaccttgtgatctgcccgcctcggcctcccaaagtgctgggattataggcgtgagccaccgcgcccggccatgactttcttttcttttctttttgtcctgtttgttattttgtgagattcctagtctgtggattggtgtctttcagcagttctggaaaactcgcagattttcaagatctcctcaaacattgcctccgtcttggtctcattatcctcctcttgtgatgagttgtgggttagagcttcccactctgtcctctgcactccttctctctcttctgtatttcccatctttctgcttttacatcctgggtaacttcctacagtcattagttcactcctcagctgtgtctcgtgttactagacccatccagtaggtttgtgtttcttgtattatattcttcattccagaagctgtatctgttcttttcaaatgggattgtcattttaaaaagtcgtctttctccttatacaaagttcccaatgtcttcttttctttttaagctattaaacatacttaattttacccactctatctggtatttcccacatctgaagtctttgcaagtctcattaaacttcccgtgtttatgctggatctcactcatggtgctttgtttcttgtttgttttgtgattttcgttttttaaaagtgagcttataattcttagaagtacatctatggaaactcttggcctaggttgaaggtgggtttctccagggggtccatgaatttatacccaccagatgtcttggaaacatccccagctttgactattttctattactggcttcggtgtttttgactcacccagagagtatgattttagtttataaacctccttatgggcagacttatggttacacattctcatgggtggagatagttgttcccatcctttcaagactagtcattttccttgcaggccgctagggtaggaagggtctcggggatgaatttattcctagttcaccattctacggaggatataattttgtgaagactcagctttcttcagcagcagtgttcgttgtgggagccccgcagtggaaatgccctaggctttgtctcccgtctgctagctgcaagagtgcattaaaatggaagctcaaattcattgctttggcaaatactttcgaagtggaaaccttgagtgctgaatgaactctctaagttcctgctttccttagctcatgggctccaagtattgcttactttttcttactgtcattttaaagattactttatccagcactttagttgtttccagcagacggttcctctggggatctcactcactgttgccagacatgaaactcactcaccatccttctagttccagaaacatgtggcatcaacctacgtggctctccctggtgttccggagggagccggggagctggggtcagctctttccctgtctgccttgggtttcccttctttcattgatttcctcaaggggatgcttaccttttctaaaaagacttgacaacttccaaaggttagcagaaatgggccaggcgcagtgactcatgcctgtaatcctagcattttggaaggccgaggcgggcagattgcctaagctcaggagttcgagaccagcctgggcaacatggtgaaaccccggccctattaaaaaaatgcaaaaaaattatcagggtgtggtggcatgcacctgtagtctcagctactcgggaggccaaggcaggagaattgcttaaacccaggaggtggaggttgcagtgagccgaagtcacaccactgcacttccagcctgggtgacagaaggagactgtgtctctaaaaaacaaaaaagtggaaatgaaattttccaccatacctcatgttatctcaggtaaatacccaaaaagtgctggtttaccagctcatattgatttttcattttcatgagcttcaaattttctgaggatattttataactaagtcctgttgcctcaagtctatgctgttaagtacaaaagcttaaagtttaaaacatacttggaatttgctacgtaaaatatgcactagctacaggtgcatttaggtaatgaatacacatgaaaaagagggtagacctgtgtgtgcccttgagaacaaggaattttctcaaccataagaatcctctatagaccctataatttgccagttcttttttatcacacacttgttaggggattgggcaatgaaatgttgctggtaattcttcagaagaattcatggggatgagtcgaattttcaccgtttagttggaggcagcttcccaagtctgctaaagcctgtcttcagcttcccctgaaagttggccctgttggcatcctctgatcgagaggagggagaaccttgaatagtagcagtggggtatagaataaccatcaccctagactctagggtgattcttcctaaattgtactttacatatctttagtgctctgtttgctgagatattaatagatgtctcttgacaaaggaagtgacatattcagacagagcgggaggacatcgtgtacacggcccagctgcctggaatgtccacataggaagtgctcggggcagctgttctttaggatgggagactcagagggaacaacttaaaaatacccgcaggctgggaacagtgtctcacacctatcattccagcactttgggaggccaagatgggagggtctcttgagcccaggagttcaagacaagcctgggcaacatagggagacctcgtctctactaaaaattaaaaaattagctgggcatggtggcaggtgtctgtggtcctacctactcaggaggctgaggcaggaggatcacctgagcctgagagttaggggctgcagtgagccctgattgtgccactgcacttcagcctgggcatcagagcgagactgtctgaaaaaaaaaaagccctcacattcacttgagattaagaagacaggacaggaaagtctttgtcagagaatgcaagggatgttgctgttggagaatacatccccaccctcggcacctcttggacaggccactggaattcgtcttcctgaagactcgccattggaggtagcctagtgaatgccttgcagagtcagaaagcccgttagactttgcttaatgagtcagtctccctactgttgtagccttggagtcctttttgtttttagaaaaagacccattagcagcttgcagaacacatatgtcccatgaagggcagtttgggagaggctgacccaaccgactcttgatcgctggcactcgtgcagcctggctttgcaagctatgaggacctgaacacttgggaattgttctgtgtcttaaccatgaatatttgtttgcaaaatttggttgagaagattaattaccttcttgttaagcatatttacatgattagactattttgtgatttgctacaggtgtaaaaatcagcctgttgtggaagatctggagtcattaggagcttttgcacttgctctcattagagatgggatagagcaaaacaaaccaggagagttgaaagtatgacagattgccttattaatgtcctctctgagtacctgtgctggatggattgccagtggaataacttgggaggtggtacaaacccacaagatgacagtcatcctctgtcattgctctcttttgtgatatgagtggcgtgaggaggaagaagggagcagttgctgcatttgatttggaaactgaagttgtcacggggtctgttccatgagcacgtgacgaggagtcatctgagctttctctcagccatgttggtgacctgctctgttttggcatacaaaaattatcttaaatatgggcactcttgtaagatgagaatgagatatatggaaaaataaggaaattatacaaagagtaatagacattactggcactgtaatttgaaatctagtagccgtctctgttttctctaaggctggtgagtaatcagctccaagacttggttttgtctccatggcaagtggctgaacatgcagtgccctggtctcctgtctgcaggtgggctaaggacactagtgcttactttgcagggttatggtgaagtaattcacgtgaagctcttagttaacaaatgctacttgttgaacatgtttgtttttatcatttttttcccctaaagcagtattttgaaaactggaaaatatttcccatctgtttcttttgtttaaggtgataaatgctgtggcattccattgccttgctttttagcagtggctggccaggctgacttcttgctctctggacaagctgcataattctctattagcctgtagccttgctgttttctagaaccaaaggacctctcctcctgctatccaggcagacccttgaaagtggaacattatacatgattctagaaaatctcctacaacagacctttttttgttttttgtttttttaatatttgtgtagcattgcactgtaccctcatcgtataatgttgcttaagagcatgccttttacatatctttcccctgcaggtccttggaagggctagtctgcatatctcgtatctgcactgagtggtcctaaggggttgtttgtttgtttaaactgcaaatgtgatctgttttcagagatgtgactgacttgctgggcttcatgtcctggaacatggcacctgcttgaaatcctcaacagtctttgtcctgtgtcatccaggtagaagcttacatgctacaaaaaaaggactagaatgatatggcatcagacacaaaagccatatctggaatgtttagctctgtcttttttatctaagccgaatgtgttttctactcttttaaatgaacctaacacttaaaaacccagcagtaaatcctagggtgttttggggcttggggggggattttagtcagaaattcattgtcagctttttgcaaatatttgatagtgttatcttaaatgtatgtacgaagtttgtaaaggtgcgtttgatgcatttacgaggtgctgagagtggatgctcccacctgtcattccagcctcacatccccaccttcccggctctgtcctttagcccagatccagctgcccaggagcaggaacgctgtgcccccggcaacattctagatagcctgtgcccgtggaggtcccagtgtccacagcagtctcctcttggtgcccccactgtgtgcgaggcagactctgagaccatccccaagacccccaccccaagatgtgcacaccctgggtggtctcctttcctgggtggggtcagatgggtatcctcacattagggcaaattcagtgacctaggtgaagggatttggtagatgtaattgacatccccgatcaattcatgagaatggagattgtcctgggtgggcctggtctaatcaggtgagtctttaggggggacatgcagcagtctcagacaccctcctgctggccatgaagaaatgagccacactgttgggaggggagtgggccacatggcaaggaaacagtgaccccagccctgcaatagcaagggactgaattctgctgacggtacaggcgaatgctgaagaggaccccaggcctgggatgagagtgcagcccgccttgatcccagcctcaggagagcctgacccaggctgacggctcagtattgttctgagcttctggattgttgaagtctgctgggctgtggtggaacgtagtctcctgggctcttcagagccactggccagagcgtctccccatttccttgctgtgtaccatgcagttgcctccctggccactccccctggtatctggatgatgtctgccacagaccttttctatggggacccctttgcctttccaggtgggccatttgggaaggatttggaccgaccccagtgggctctccctggtgacacgaaccttttgctgtggctgactctaaggttaaggtggtcccagccccaccctttgcagcaggagacagcccatctctctgggtctctagcattcctgggtgaggatcaggccacagtccatgagcctccctgccttgttaggagcttcttggctggtgaacctctctctgccttggcctggacacaggagggggaccattcactctgtccctggagaggggtcctagcgtgatcctcggcacagatgcctcagaagagcttctcttcacaaaggcatctttagctgtcagcacctcggtcttccaggtcgggacccccgacttcccttgtaactgagaggagcctcagagcaccagggaagccccttctgaatcaggaccgggccctgctgcatgatagagaagaaccaaagggtcttgggttggtttttattttacactttactttgaaaaaacacacgtgatcagcaccctcactttgatgtgttatattgactgtatcttgatgcttcctttgaaacttaaaattacacattctgttacacctgtttaattttttctaaagaaaaatgcaggttttttatgcttaataaaatgaagttagttgagtagatcaaatatcttcacctggggctttgaaaaaaaatttaagcagagtggttagtctgttatctgggaacagagtttgaaggaaggccctaagttacctggtcaccttattactaagaaggaaagttactgtctgtatcaggtagtgcctcagtaacgccgtgtaacaaaccacttccaagctcagtggcttcaaacaataaccatttattatgaatagctcactaaacatcactttcacctatctttgctccaaaacctgctcattccagcaaaagccgagacaaccagatcatatggaatgaactgtgcgtatttcagctccctgcaaaggagatgtggcttcatgcagggtccccagaatggaagccttgcgtttttctccacatcagaactaagcctacgattttatcctgagcttctgaagctttaagagtgacttgatcttcttgatcttaaaaagaattaaaatgccaactaagttggcgtgtgtcactctccatctcgccccagttctaaattaaggctgccctagttaaagctgcttatatcttcactgtgcctgagtgttagaagagcttaattacaatccctgcaattggtttgggagtgtgcgtgcgcctttgcatggatgtgtgcgtgcttgcgggcaggcacagacacacgcgtactcaggtctaggtgcaaggactaaattcatctggatacggtgctttgtgatgaagtgggagtggcgtgggagctggcagacctgtgtgttgagccctgactgtcccacatctgattattttgaccttcagcaaatgacttaatgtccaagagcttgggtgtccctatttgtaaaatagagacactgaccttaagctctctgtttttctgggagaacgaagagcatagaccagcacctggcacacagtgagcatcatccccacgccctgagtccattctgcaaatctcacatttaaacacgctaaagtcaacctctgcctttcagaccacagagctgcttccagatcctggccatcctggacacctggagaactaccagtcgggatctgcaggaaaacgtgggcattcccataaacgtcattcgttttgcagaaatctgaccaatgtcactggaagttgatgggcgtgcttcagggggctgaaatcctgtttcaaatctgtgttgtgtctgggaaggtcttggcatctgccggggtgacccacaaaaggcccagcctcactgggcttgaggaggccctggaagcagaacatgagcaggagagcagagctgggtgggaaccagaactcccgcttgcctgcgcctgggtcccagggagagtggcacctgtaagtggaaaactaaagcccttacttagcagactatgagacgtgctgtgcccactctagggggcggaatgaccaggaggaacggttcttctcccacctgtactctgggccatgtaccccagcggggcctcaccaccccctttatcactcttctccaaaggatatcttgcgccctcctgtgtgtctatgtgaggtttctctctgcatgcagatttagagcagctttttctatttcagaatactttttaggtattaatcatgcttgaaatctcatggactcagtcgcgatttgggaattttattatattttattttggggggaagggagctaatttcctgtgggaattttatggcactgttataagcaaacactcccataggatggatatgggatatatcctctgtgcattttcatttcccatcgcaagttaggtggacagcatctcccaagccttcaggatttccgcaggagcctactaggccctcctcttgtcaatgagcctggagtgactccttgcactgcatgtggtgggaaaaatatccccggataagctggggcatgtcataaagtgtgtggaagggatttttataatattggaaaacatataatgcactctgaacagctttaaatgtgtgagaagagaaaaagagatgtgtctgtaagaggggaaatgaagttagctccaaaaacaaagccagaagtataaaaaagcaattaaaaagtctctcacatttttgcattttctgtatcatgagatcacttgtgattgagccatactttttaaataatgggcaacattttctccattgtcttgcttgagcattaactaccatttctgtgttactcttgtgaggttatttttggtgtgatttgatcctagtcagagcaaaaataaaatgtcagttctacaatgatgtactctataatgtagaaagcacttgccatgtgtcatcgtttcatctttatcgcatcctcgaaggtgtttttccatttatatgtgggtgagctgggcctcaaagaggacaggagatttgcttagggatgtaaggctgagaaacagcagacacggtgtgaactaaggcttctgagtgctggtccaaagtcctcccctcctctcctcctctcttccccttctcttcctcccttcctccttccctcacttccttccctgagtggtgtcctggccccttttctggttactgtctgtctcatgaatatagatgatctggatgggtgtatagaatgcatgggactgttatgtttgtgctgcaggatgaaaagcacccctgtcatttgcagctgcccttggcagagaacgttgggcagtgatgctgactgggctggaacctcatgtcctggtgcaggttccctgtaagacaccattaagtttcgtgcttttactcagctcattggagaaggctgtgaggcagagaagccaaataagtgaatttaatggtgctcagaaaataccagttctacagacacttcatgacaaccgtcacagatcagccttagagagtcgtgcatgggaagatgtcttaatattgctgacagggttgtcgcttggcatatgcccttgtccttgaatgaagcatgaactgtgccttgtataggaggcgggcctccaggctgacacttgggtttgctggccttctggagaccgggcccttatggtgctggcctgggccgagggagcctgttgcacacacagcttttccagaagaccttgttcttcccacctcttctcaatcctcgccaaagacctagctccaggctgacccaatgtgagcctctccccagcctgcagtccctcacccgcgggctttctggcttctcaccttgttctgctcaccggcccctctaggaaatttgttaggactcggccacatgcatggctacttggaagaggcagaagagagagctccgctggagggagaaacgaggcagagtgtgagagcaaaggaggggaagtagaatggcccaagcagtcctacatggtctaaattggtgggtgaaaggaatgagaaggacctggggacctgcctgagtcccaggaggccaccatggccttcacagaggcagcccatcaggtctggggctggagaccccgggctgccactcctgcagcaccccctgcttccctcgccatggacacccattctcaaagcttgcctcctgctttagcctggcttgacgtcctgggccagctgcctccatttctctgtcggctcctgccctccatgtaggaggctgggacactccctcctggcttcctagtgactgtcgtctgcctttctacccaaagttgtggcttctgcacctggcctcacacttcactgcctgatatgctgccctggacaacctacctgggctttcctacagcagcctggtagcagatccctgagagtgggggctcttccccacctgagtctaaaagtatatgggggaaaacacagtgactcctagcccacatctgccagtagtcttcctctgccagcactgagctggagacgccttacctgcgttaccctgttagtcctcacagcagaattgagcaccattattactattattattttgagatggagtcttgctctgtcgcccaggctgtagtgcagtggtgccatcttggctcactgcaacctccgcttcacaggttcaagcaattcttctgcctcagcctcctgagtagctgggattacagatgtgcaccaccacgcctggctaattttcgtatctgtaatagagatggggttttgccatgttagccgggctggtctcaaactcctgacctcgggtgatccacccaccttcaccttccaaagtgctgagattacaggcatgagccaccacgcccagcccagagttgagcgctgttattatcatctgttttcaacctctcaacaaggttagtataatttacgtaagtttgcaaatttatgccactttcaaaaagaatagtttgctcttctacaactagcttgttgcagagttagattctgcagtaacacccgtggttcccattgcacaccccactggctcctgcatagcagcgttcccccaactgtaggatacatgactcccagggggttccaggaagatgcagattctgattctgatgttgggagtgaggcctgggcatctgcctctctcacaagctcccagtgatgcccctgctgttggtctgtggcccacgctttgggtagcgagagcttagatcctcggccgtggttctagcttcccaatgctttggatcacaggaggccagagacactggcccaactgatgtcagaatgatgggaagtcgaaatagcagcatctacttgaaacccttgcttagaaagtacagagattaaagatgtgtagggagaacctggttaaggagctcactgtctgattctggctctgagcaaaccagagcttgcccccagccaccccctcatttggcagtcctgggcccccagttgcccggcactggccaaaggcccatgtaccatagtggtgacctttcagaactagctacttgggagattcaggttctctctttgatgtattcctcccacattccaaagggaaaggtattctccgaagatggcctttgatgatacaaatggtggtgatgactgtaagctacctggaacactgatgcctgttaaaaggaggtcatccacaagtagaaaatgaaaaaatgcatatggagaccttggcaacctcaaaggcaggctgtcgcggtgcaagacttttagaaagccctgtaggaagctggaatgccacagagctcacagaactagacccaagtaaataatacatgcctttaggatgggatctatcaagtgactttgtgaagtgtggttttcatagtcatgtggacatggcaagaaacaaaggttgagctgctaacccctccagtgtgaaaaacactgaaaagaaaatataacttttggatcaatagcgatcctatcctttctctgaatgttggcaggacatttaaataatgtgtgcacagaagacagcgttctgatgtccttaaacttgtgtttcatccacataggctgtccacagagtgtgtcctcttgttacgctgttactgctttagagacttccatggcaccatcccaccgaggtggaagaggttccgttttgaagcactgtcatcctcagataatgtttgctttcatgaaaaatgatgtgtttatctctgtagtcggaagctttctcttttgaaatatctcagataatttgaggtgactaggtggtatttcagggtgagtttcatcctcaaatatgtgtccttagaggccaagttaaaggaaaaaaaacactgcccgatcataaaattcacatttgagtcaaaagaattaaatttgccccctacctgtgcttccagccatgtgtctccagactccttgatggatgatttgtggagtcaccgacctgctgctgtaaaaaccataaacctcaataaagtgatgtggaaatgtagtgtacagctgcagacttttaaaagtaagaagaggaaggaacacatgttcgtcttcctcccccagaagaaaaacaacattggattctaaaagatggcctcctcctttttgctcccactgaatgccacagctgttaatggacagtcttagaggagatgatggggtcatcagtctgtttctggagcattccgaggctttagatagggagcagcatgattctagcagtgctgcgtgttcttgggcagcgtgtccttctagtaggagtccaaaaacatcctggccaaaatgaaatgatttccagcaatatctgcagtgaaagcaaattgacccaaggataatctgtctcccagcagagagaggcggcagggtggggtccgctggctcagcgaggcaccctggactctctgcccactgagtgagtgctctcgtgccctggcacgataaaacatgggttctttgttacagcttggtgacgtgtgtgacatgcagggaccctgccagggcccagggtggacccccagagtgagagctgtggctcctgctgcctggaagcctgccctcgagccaggaggaaggggatgggggcatgagaaccatagcatttggtgagcagcccccgcagatgtcccagggtcatggtggtgtgggctgggggtggggtggggggtggtcctgggcagcgaaacttcatttggaaggactatattctaaacacttccaaaccaaaagtctggatttagagtaaagttaagctgcctcttaacacagtggttctccttcgtttcatctgctgaccacactgtgccacctgcaggctggtccgcttgctggctgttcctgcactctacaaaactagaagttgctattccttaaccctggggcctgccttgggctcaggaccagcccagtcctggaggcagccaagggtccacaaaggtcacatgggcactgggtggcaccagttccaactcaagattaagtcacatgcttgatgttcctttaatacaaagtctgttaagtacggagacagatgtgtgactgtcctacttgtggaatcagtcttacggcttaataatcacactttggccgtgcgcactgtgtgattatagaatcacatctataatctcagcactttgggaggcaaatgcaggaggactgcttgaccccaggagtttgagaccagcctgggcaacatagtgagaccccatatctaaaaaaaaaaaaaaaaataggtagcctcccagctactcaggaggccaaggcaagaggatcactttaggccaggagttcaaggctccagtgagatatgaccgcaccactgcacgctagcttaggtgacagagcaagactccatcttttttttttttttttttttaaagaaatcacactttgtgataacaatgtcatggggagaggttgtctggctctggtctgaggtaggaggaaggcacaattcctggtgctcagagatctgctctttgggctggaaccctgatgggcctcctttagtaggaaatggagatggagagaaagcgctgcatctttctccttagagaactctggggttgtgctggcctcagagacagtggagggggtgagggtcctctgagggcgggagcggccatatgcaggaggctgcgctgaggatgcagggtggctggtggccctgctggggggcggcctggccctctggagacagagcttcccatgccagtggctgtttgtgctgtgtggagtgtgattttcacactgaccccccaccacccccaatgtaggcagagtgtggtcccctgcctggtggtcatgttactttggaggataaagagtaggaaccctggtccatgcagggtgatgggcagtgagagatgggagcagggctggggacagccgatgcagcctcagagctgcagaggcagctgccgggctgttaaagtcacccggagggatgcaccccgccgtgcatgcggtggacggctcctgcaattgccttcagagggtaagagcgattgggaggggcagcgaagcagccgacttctggagtatgtattattcctccctctgagaaatacgtgactatacattcaagattgcggctgaaacttcggtggtagtattcggcctggatgacctgtggcattaaactgatgcttataaagtagatgtgctagttactaggatttggtgatctgagtttatttccaaacaggtcaggcccagatacaagcgaccgcgtagttgggagaagagcaatgctggaacagtgggtccctgtcttccacattttcctaaagtgggagggaggcggaggagtgggatagcttttgattgagggcattgacatttgtctaaggaattaaacaactgggcagctagatgacctcagtaaccagtctcgtctcagccccagccttttgatgctcatcatcttgtctggttttataaacagggagatgaatccaccttcatcggacttggcaggacagaggcatgttcatctgtgtaatcaggtttaatagcagtggcgcttgtgaaatagtttgcagtcctggtgcccagggtggaagccttctttgctcctttgtgttcctggggtgtgatggcatgcctggccctgcgccttccgtcctccaggctcccaagctgagggtcaggggccctgtcctgggcaggggccgtggaaggagcccttggtcaggagcttggagtagcaatgtcgggttttctgaatgagaagcaaaacaacactcgggaaatgagcctcgtttggctggaaatagtgtgccagtgttttcttgcttcgggttagataccagttaatttacccattgtttttcattaactaatacatcaaatttctgagcacctactgtgtgtcagggctaagggataagccagcgaccaatagacaaggtccctgcccctcacagcaaccatctagtgatgggctcaagtcacagggcttctgtctgaataaacttgtgtatctccacaaagagatgtttttgttgctgcaatggatttttcatcttgaaaccccagtcactttgatgtatttctggtccccaactactgtcaaacatttactttttaactcctcatgaccactttgaagaaccagaaagggaagataaagaaaataacattgcaatgagcagatctttggactagagcattttaaggagaaagggcttaattttgaagaaagtcaaaatagaattaagcatttacacttagcttatgatcccaatttttttcatattctttgcattaaccgtaacatttttcagtgtgcctggcaagaatttggtttaaacatgtggatttgatttaaatataaattgtacttacaaacggtactccagttgcccattaccatggatgttttggaagtgattatgtactgaatcttaccatgaagcagtagtccatgtatctgaattacatttaggccttttaaaacatatcacattatgtatatagttagaaggagggatgagatgggtatttttgaattgagtttaatggcttacttcaataggtgaataaggttctgctctgggaattaaagggacttttaagtttctctcttgactctgatgtgcctttcactgaacagtaaaggaccggggagacttgcccagctctcctacttgacaaaaggtgaaatagaatgatgccatgaaatgcatcaatgtaaaatgcagttttaagattgcattttaacttgagagggtcgtgaagctcttgccttcccattaagcccccaggaataatctccaggtgtgtcttctggcactccacgctgcctgccttctgatgcttcctatgaattgttggaaccagccatatccttctcacttctgccacaaaaactcctggtggttttgtactttgccaccttgtttaggtttcataggcgattggttcaaggcagtgcctatctgcacttccctgtaactctcactttttttctttaatgtggcctgcatatgaatatatcaacactttttaaattaaaggctaatgagctcactgcacagcctgagtacgtttggtatttggccttcttggagatgctctgcatgtgtcaaatgttattttcagaaaactggctaaacttttaatgggacctgttgttaaatcaccctgtgtttcccccataaacacgaatgttaatttacatttttaacctaactgaatgagttgtttttcttaaattcctttgcagtttgaaggaacataccttgcaacaggaaagctttaagaaagaggacgaaaaggctttataatctttcttgaagagaccctgttgctaaaaagaaaaaaaaaaagaaagtcaaaataaacacatagaagagagagaggctgcatttgtctggtgtgccctgtactttcttatactcatgtttgatatttgctatctattgtgggacatctttttgtatgctttgctgaggtagaattcacatactgtgaaagttactcacttttggtgaagagttcgatgaattttggtaacgacatacagttgcataatctacaccacagtcacagaacagtcttatctccctgaaaagttggctcatgttccttgatacccagtccccagtcccgaccccaggctccaggccacctcggacctgctgtcactctacttttttctcttctggaatatagtacagtagaaacatgcattatgtcatccttgcagttttgcttctttcatttagggttatgtttttgagactcatccatataatggtgtgtttccatggttcattctgttgtactgctgagtagtgttctatggtgtggatgtaccctactctgttcatccactcatccattgacggaactgttcattgtttccagtttggggctattagaaataatatttctgtgaatattcacatagaagtctttgtgtgggcatatattttcatttttctttgttaaatacctgagagttgactggccgggttatatgtgtttaatttaatgggtaacgctatactggttttcaaagtggctttaacattttgtattccagccagcaatgaatgggggttctgattgagccacattctcatcaacacttgatattatcagtccttttacctttagtcattctggtggttgtgtagtgcatcttactgttgtttgaatatgcatttccctcatgactagtgatgttgagcatctctttatgtccctcttgcttatctgtgtctttacttttgtgatatgttgttttaaatcttttgcacattttttattgggttgtctattgatttgtaagaaaactatatatgttttgaatacaaactttttgttagatatatattttccgcaaatattttctcctagtctgtggtttgttttttgtttttcttagctgttttcaaagatgaagagctttttatttgtatgaggtccatttcataatttttcttatataaattgtggatttcatgtcctgtttaagaaatctttgcccaacctaatgtcacaaagattttctcccatgttttcttctataagtttaacagtttcagcttttatgtttagttctatgatcctatcaagttaatttgtggatatggtatgagttaagagtcaagttcactttttgaaataaagatacaattgtttcagctccatttggtgaaaaggccatcttttcccccattgaattaccctagtaccttcattaaacaataaaggaccgtataacattgagtgtctttttggagtctctattctgttccattgatctgtaggtctatctgtataccaatatcattgtctcttgattactgtagattaataggaactcttgaatcaggttaagttctccaaccttatcccttttcaagactattttggctttaggtcttttcctttacatagaaattttcaatttagtttgtcacctattcgaagaagtatgctaggattttaattgcagctgcactgaattgaaagattaatttaggaagaatttccatcttaataatagtgaatctcgcaattcattaacatggtatatctctccatacactaaggtctttgattttccttttataattttcagtgtacaggccatacacacctttcattaaatttattcctaagaattgtttatgctcttgtaaatgaaagtattttaaaattttcattttaagtcactgctggtttaaagaaatacagttgatttgtgtacataaaccctgtattctgtgactttgctaaactcctttatttgttctagtagctcgtttgtgtattctctagacttttcttggcataaagtcatatcttttgaacagagacgctgttttacatctttttttcccagcctgtatgcctttaatgtctttttttttttactttactgcactgttcagaaccttcagtacaaacttgaataaaagcatttaaaaaaataggacatgcttactctgttcctcatgtaagataaaaagcaagagctttttatgactgagtagtaatatgagctgtatgttttttgtaggtacttttaatcagattgaggaagtctccttctgttcctactttgctggtagtttttacaataagtaaatgttgaaatttgtcaaatactttttctgcatctattgaaatgattatatgtttttttcaaatattctgtaattataataaattgtattgattaagttttcagatattaaaccaaccttacatgtttgggataaatcccatttggccatgatgtattattccttttatatattgttagattctgtttgctaaaattttgctaaggacttttgcatctggcttcattagagatattggtctgttgtcttctctttcttatgatatgtttatctggtttggtatcagagtagtattggttcataaaatgaatagagaaattgtcctgtttcctctattttctgaaataatttgcataaggtggtattatttcctttttaaatacagtcatgcattgcttacagaagggggtaggtgtacttacataaacctagatggtatagctgactgcacacctagggtatatggcagcagtccccaacctttttgacaccagggaccggtttcatggaagacaagtttttccatggactgagggtgtgcaggaggatagtttcaggatgaaactgttctacctcagataatcgtcatcaggcattagttagattctcataaggagcatgcaacctagatccctcacctgcacagttcataatggggctcacacacctgtgagaatctaatgctgctgctgatctgacaggaggcagagctcaggagataatgctccctcacccaccgctcacctcctgctgtgcggcccagttcctaacagtccatgaaccggtactcgtctgcagcccagaggttggggacccctgccgtacagtatagcctgctgctccaaccaccattataaatgtggtccatcattgaccaatacattgttatgaggcacataactgtatttaataggattcatcagagaaaccacctgggcctggaatttgtgtgtgtgtgtatgtgtgtgtgtgagaaagaaagagaaaaagggagatatttaattattatttagattatttaactgatacggggctcttcagtttttctgttctttcttatattcattatcataatttatatctttcaagaaatttgtccattttcatctaacttgttaaatctattggcacaaaattatttataatattgtttattagccttttaatatttgtaggatctgtagtggtatttcctcttttgttcttgatcttggtaatttatgtcttccctgttttcttcttgccagtctagctagagaacttatcagatttgttgatcttgtcaaatacccagcttttctcttcattcatttttctctattacttttctactttttattgaattgtgttcttatctttattatctctttccatttacttactttggagtttgtttttctttttctgatttcttaaggtgagaatttagagaattgattttatgtcttcttttataacacaagcacttgaaggtgtagacattcctgtaagcaccaatttagctgtatctcacaaatttttaattgttttatttttactgtgattcaattcaaaatattttccaggttaccccatatttttttcacccattttaaagaatgggatagtagagtataaatgagagaaaaaaatgcagctttccattcacatatttcttggatgtgaagagtctcatttaaaattttgatgtctatgattttttttttttttgagacaaggtctcagtcttgcccaggctggagtgcagtggcacaatctcagctcactgcaacttccgcctcctgggttcaagcgattctcccacctcagcctccccattagctgggactacaggtgtatgccagtattccaagataatttttgtattctggagtacagacagggtttcaccacgttgactgagttggtctcgaactcctgacctcaagtgatctgcccaccttggcctcccaaagtgctgggatgacaggcatgagccactgtgcctggccttatgactcttactgggaataagccttcctcagggaagtcaggctctggttagggcttatggctctagagtttatctgcttaatgatgtctttgaagaaatgatgagtaatctttctcttatttgtccctaggagggaaattagggttagtgtttttgtacctccttggctcttaatgagaaattcagtttcctttggtgtaacttttgattttggctttaattcccctcccctcgttacaaagaaaaaacagagaagtagtttctgccaagtactctttttctcagagtagagtgattgcttttataggcttgtttgagtgataaaagcttgttaggaaatcatctttatgccttccctgcaatgctttatttcgagacctctggggagacatggggtccaggaaatgggtggggagcatgtgactgtgtgagcgcaaggacccacgtcagggagcaactgtgtgcttgtttgaacaccagctagctgaaggaagaggttattcaggtaattgctcagtccctaaacgtagctcaatttccttttgttatatttgcatagaaaaagagctgttcaagggaggaaccagagcacgaaaaagctagtatttctcttttgccaataggaaaaacagatgcaagctcttcttgacttagtatccttcactacagaaagcccttttatgtttttgtggataaacatagattattttccaccccctttcctcctctttcaaggtggctatctgactccatgcacctatttagtatttatcactgttgtgatatttgtgctttcttatttgcccaaatgggagaagcaaatgaagtaggtatcatgatcactgtgtcttggtgggaggaaagacatgacatctgaaattaatgggactaatgtaaggattgatattttcatatttgctcaattgcatcctgggttaagcacattcaacaggtaaagaattcactgtctaattataattcttctttcaaaaaagaaacccatagtgcataaaaaagaagtgtaaccaatgtcaacactggaagggagaaacaggtgctggcagacaaatgtcctgacatggggccacattgctatgccttgggctggctatggccacctgggtccttgaagaccactgtcagcccacaggcaaagtcctgtaggccctgacacccccagggttggggccgatggagccagggtcacccgcatgccaaagctccttctggcccaagaacagggaaatgaggaaagtccacagtcagaagttacgcagccagatgccagggaggttgagtaaaacagaatattttgtttggtttgttttcatgccaaatcttcccaatttatctgtgtttgtcttttttaaaaaatacaagttttaaaaaaactagcaaaagatatgggccaagaaattgagatccccgtaattctttgtttagtctgtaaggcagagtacatttgcatctgaaattaaatggccattgaataaacacagggactcaatatttgtaagggcactaatgtttgcagatgtctgcagttgttaagggcaagccaaggaaacaggaaatgctgggactcatattttttttctggaagaaatgggcattccaaatgcatcctatataacctttttttcttcttcttcttcaggtacatccataatagtttctgaaaggtattcaatcctggtggagagctggagatgtgtttatgctgggggttgttaaatatatttacagccttttcagagagttccgtgggggttcgtcagtggttatttattagtctgcttcaacatctgctggctggaaaataatctgtccaaggcaattcacaggaacattataaattgcttccgattataatgagcagtaggaaaggtaatttgagggaaattccacgcatgttagttacagcgtgtcagaagcaagatctggtgtgaaatgcccagagaatcagtgtctgctgataacagttataagatggaaggttctgggtgtctcgaccgtgtttttcttcctgtctcacttctgggcttgctgggcaacttgcctgcttgctggggttctttggagcctgtgggcaccttcatgtgggcactgagcagagccagccctgccccttcctgcaggcactgccagcggtccctgagtggaggtggaggtggaaaccttgagtgttgaggcccctgggggctgctgcattctagtttccaagacagagtctgcagagctgtggcaaccctcagaggcccacacacacctccaaagccagcccgaccccgcaaggcactctcaccggggtataaattggtgctgccattttggaagacattggaggaaaacgcaacaaaatgtaaaatgtgcagaccaatctcctcagcagtttagaccaatgacaacaataactattcaaggacactcattgcagcagtgaaatgcgtggtccactttaagttgcttattataatactgaaaacttggactgacattaaccagtgccaacaatagggacttggttaaagaaattacagaaggaaattcactctatactgttcagtggaaaacaatcagtgagaagcatttgctcatatatgcaaaagggtgtgcacacttgggtgtgtgtaccgagattactggaagaacagtgtgaagagtggtctcctcaggtggtgggagtcccagcttcctttgtgagacatgagcatgtggagactagaactggtctttctcatagaaagactgttggttctggtgttctgcactctgcacgtttctactaataattaaaatacttactgcctctgagatgcctccggacacccttctgaatcacagtgttcagaaatgctctctaaatcaggaaggtgtggatgacctttggaccttccctggtgtgaggagtttagcacactgagagtaatatatgaaaaagaccgccaggcgtggtggctcacacttgtgatcccagcactttgggagaccaagccaggaggatagcttaaagccaggaggatagcttaaggccagaagttcgagaccagcctggacaacatagtgagatgttgtctctacaaatatagcccaaaaaaattagtggggtgtggtggtacatgtctatggtcccagctactggggaggctggggtgggaggatcccttgagcccaggagttgaaggttgcagtgagctgtgatcatgccaccgcactccagccctggcaacagagtaagaccctgattctaaaaaaggaaaaaggtcactctctactcaagttctacttatataacagcaatgcagctctcttcataaagctggctgttgtgtagtttatgttggggaatcagttcatggtttaaaaagttctgtcaatgcagagaacaagccggtgtgttttatggagaggctgtttaatctccactgtgagacagtaaatatttggctgttgcatcatcgtgaagcttatgatcacagtctggcgccatctccctccttgcctggagtctgatctgtcccggcccagtgtcctccaggaccctggcccctcatgcctccgtgcttgcgcgtgtgccatttcctctctccagaggacctttcctgcctaggactcatgattgtcccctccctggtaagccatccccgaccttccaggcagaacctgctggcttctcctcagcactttgcatggatttctgtcacagtcctgggtgcactgtgtcgccctctctatgtgtcagcctcccgtcccctaccgtgggctcctccagggaggtgtggacattcatcctcttccaggcagccctcaggaatccagggagaagataaggaggcggggcgggcggaggtgggtgctccacacactcagaacactttcctctgcacttacttcattctggtttttcttttgggtccttggtgtttttaaataaaccctttcctgtagtttgctccccttccatggagggctgtttcgagcacagatctgctgggtgtctgtatttacaaagagaaggggccactcgtgtgtgagcagcaccgagggacagaggtaccttgcctgcttgtgtcccctccaagtccttctgatattttcctttccagctgttgcctagtttcctggtattaaggagaatcaactctctggataaacgtggtaaatatggcccatagtcccatctttttacaggcattttttacacctggagcagccagaggacgcatgcatggctcttcggaaggtaatttagggatcacccatgtaagtttcctaaggatttctttaacatggttcttctgattcagtccggccaattaaatctaaatccacccctgaaagccatctggtgtggataacaagcccacaaatgagcagtcagctttttgtgccctttagggcctgggacaaccacgggatctaaaaggggctggaactagaggtcttgagctcctgttcctaaaatcatcttcatcctatatctgcagccttctcctgccacggcatgcacccacacatgcgagcctcccgggtactgtcatcctgaattctgagaccatccagcacttcctttagttttgccctggtgctgttgacttttgtttactgaagagtgtgctggaggcaggacaagggacatggaaggctgcaatttaagagtctaaaaggttttagaatcctgaaggaggtttaacaagctgaattgaagaataatacctttctcaactggagagaatttacatgattgcattattgttaaaattaacatctcatctattaaaagcatttgtagattatctttgtaccttcactttctttgtctgccttacattaggtctcagaggtagattggtggagtcacctggagtttgttggtgacttggggtttggctggcctgtggagtcagccagactctagctctgatccagattctgccctttatctcctctgtgcccttgggaaagtcagtgaaactttctgagccacagtttctccaataaggaaaaacgaccgccaacggggctacctgttgagccctacctccaacagggctgctgggaggattagccaaagagatgtctgtgagggaaaccagcacagactctggcatggagtatgtacccggggataccaggacgaggcctgccccgaacgtgcaggcccacatacgtgcatacgtgtggacgtgcacatgcatgcacacagtgtgcacacagggtgaggcaccgtgaagctgaggccgcacttctgggctttcagccttggcattgtggtttccatcgctgggcctgctatgaagccacgctgcttttcagaaataccttcagaaatgagattgggaaactttagtgaaaaacgtgttgattgcctgaggcactgctctgcctccgggctgttttcctggagtgtgatttccccgtcagagtgctgcagtgggccagggacttgtctagggtgccatggaggcacaactgttgattatgttaataggataaacaaaccttctttgacaccataaatagcagacgctgtgctttcctccccacctcctgggcagggaaaatatttgaagctggaaggaattgagccctgagcttaatacagttacagacccagaaagaaaacaaagatgggtacaaagatgtgttttcaggagacagaaaattgtgaaatcaacccatcagtcggcccaggactggctcaccttgagtggctcctggtacagtgactgctgtggatggcagcctgcatggtggatgggaaagcggagttcgtgtgggagacagagctctcgcgaagctgtgctgttttctcttaagtaggctagaatggaggacaacttacaggtagacctaactgcaacctgttgacagtgaagctaaagtccgaacacacccgtcacctttcagaggacagacagaagccatctttataatagtgattttgcacagaccaaggagaggctaggtccaaccgtttcagctgccgccaggaaaaagggtccaactccctggagcacatcagaaggttagacgtcatggcaggtgatggtttgtcttttttttttttttttttttttaatgtgctccttttattttccaaattttctaaaatgaacaagtattacttttataattgaaagtattattagagaaaacatacattaaactttcttagaatgtaaacatccactgtgtgaagtcagtcccaaagttttaacggccacgcaatctagccttatccagtggtgctccccagaaggtcctcagctgagagagtggggtggtgttagtggcctcctcttgatggcccagctgattgcaggggatctctgggatgctgctgatggagtacctgggaagatggctccaggactctgaagggctgcgtgtttttgatcttgctccccgagccccagcctctttgaccacatcattgagctgcgcacgttcagggcagacgcctggaactggagaactctagggaagcaaaggggactcctcggggactctgatctttatgtccaagttatatatcaacgaatccttttggcaacaccaaaatgtatggtgagcccttagttaaagtgtgggaaaacatgaaaatgatcaaatatgaagtttgcagattaagaccaattcaatggccctccattgaccagcgagagaatcatcctgtgtcatcttgtcttgtcctgctgggatccactaatggctttctcctttatggagtcctgtgctgaggccagcagtagctctggttactcttccacacacacaccttcttctagcagccggccatgagcagtgcggtttcttagctgcaaacaagctgcgggaactgaggagggtgggaaactggcggggcaggaaagagacaggagatgttatggagccaagcaagctaatttatgacaccaagcatactcagtgcctgctgtgcacaggtcacagtggggtggagccttccaggggtggaacatgtaaccacagctcaaaagtcagggaaagccaatggggcaggatggaggctgggaaggacccaacaggtgagagtcagtgggcttcatttgggaagtcatagtcacagagctgtcctcaatcctaagccaagagggagtttcttagcagcagcagtgaaggatagggtcgggatgcagtgttcataactgtgggatcacaggcccattaccttccccctctggacctaagttccctacctgtgaagtgagagcctgaggctgttcgggattagggcagatggtttagcccctgcttggtggggagtgggtggtaaaagtcaacaacagttgaggcaggggactgggtttatgttcacagatggagagatgggtgcattcagcctggacccaatggctgtcactcatcaagtggaaggtcaaggggtaagggaggggagttcagtgaagcagctctgccggggaaccagcaggccaactccaccactaactgctgctcgggagtaatttgtctaactgaagtggctcaacaataaaagattgaagatggcctcccctcccccctcccctcttgcttgcctgacagagtcttgccctgttgcccaggctggagtgcagtggtgcaatcatagctcatagcagcctcaaattcccaggctcaagcgattctcctgcctcagcctcctgagtacctgggactacaggtgtgcaccaccatgcctggctaatttttgcattttttgtagagacagggtcttgctatgttacccagcctgggtggttttttttttaaataccacacactactgccatgtgatgtcactgaataacactggtggaattactcagtaccctggcacaaaagtagtccgtgtgtgcagggaacttcatgcaagctcattaggcctgatgctgtcgggcacgtggttcccccatccgccatccccactttctcagcttagagaaagcggtgatctctgaggattctgtcgctgacatcagtgaggggcttgccagatgatgaagcggcacagaaaggcagtgtctctgttaggttatgaaatagccacacagaaagccagttggcttggagagggggtttcactgatctcccttgacagaggagtccccttctttttcatttacaacacttgagatgagaacatttgacattttggctggtgaggtgacactgcgcagctgttgtaatttttgccatcttgaaatttattgatgctagataagattgcagtgggccccgatgttgacaagtagagctcttgtgccagtgagaattgtgcatctgtcttcctttgttaacctgctttctgttactgactttatttccattaagtcatcctttgaggtaggaaggaagaaaatgtaccacttcgtcatttactcgagtagcatccattagggtccagtgattttaaagttacagtcacagattctgggcttctttgaaagctaaaactatttgaaaaattaactttctgcacaagctacttgagagtaaaaacaatgtcttaaacttgttagatgatccaccagtgtctaactttgtgcgtctgctgtatcagtgtcacaggatccttagggtgttgcttcacccgctggaaaccttgtagccggtggcacctttgactgagttttgctcaggcccactgggctcgttctgcccactcgacctggcaggctgcacttggctttcagtcctggcccagatcccacacctgtcaagggcgagccaggtgcagagtggcgaggggtgcatgagtgagtgagcgtggagtgtggccactgtacatggccaggcatgctgtctgcaatggggtgggcagctccttgctgtggctggaccaggcataccacaagcggcttccactgtggacaccggggaagatggtggtgcccagaagtttggaaatgctaggaagtgcagagccccaaagagggtgtcacagccctggctcagggagctcctcctatgtctgggctccccaaagggctgcagcttttctctcattctctcttctctccttcttgtcacccacaacatggcaagcaggagggtgtgtttcaggcctgtttgtgttacagctctttcagtcccaccattcagtaggtcctgagttcttgtcctgcatccagaagaacgaggtacccagacaactggagggtgagcaagtcaaagaggtgctttattgagtgacagtatagttctcatgagtcccgaggtgggtagctcctatccacaggcaggtcattctgacaaatgcagctctcagcagagaggagacccagagtgggtggctcctctctgcaggcaggtcatcttgtcatctgcctgagtctggctgagtctggggggttttatgggcttcagaagggaggaagtagatgctgattggtccataggcagccattggcaggcctggaaaaagcaccgtaagttctcactctggccagaaggtggggttagtcaccagggacctgcccctttccacccaggagcctgtctgcctcctgctgctgttcatggcattcatggcgcccaggctgttggtgccaaggggtgcctgcaagcccaggctgagccactttcagcacccccttggcctccttcccctgcttgttggcacccaaagtccagaaggggccaagggcaaggggctgggatgtcagtgccactccaagtatgtgcacacctggtcaggtcgtaatagtgcctgggctcagccacaagtttgcttcaaaattggagtgggtgctgggagtggggagaggccaggcagtgggagcaggcacttccaagcctgctggggcacggggtggtttctgggcctccaagagtccaggggtgcagggatgcccatgtccacagctgtggctggggggctgcagctatgcctgggagagtggggctcctgccccaccaacttggaaagggttagggctcccacctgttcctggctcctgcctgctccagggagcacacggccccacccatgcctcccctgctgcagccagcatcatggcagcggccattctagacaggccattgctgccatcatttgtacctaataaatatgagatgggataatgcaaggaatacttttttcattttaccatctcaagatggggaatctattaattatttcatgagtcctaaagcaacttcttgaatattcagctccccaaaagcaaacagctacttagcctagctgattctacagggagttgcatttcgcttttgtcacaaatggatgctggtgtgtgcctcacaaagtcatagttgcatgtggtgtgggggtgggctggttgagatggcattatgatgtttcagaaaagctgtgtaaagatgagaaatatttgcatccagacacagagggaggcaccatgccagcatgtaatttgccaagctccctgctggcagtttaaatgccctgttgattttattaaacattcttaataagaagttggagttttgtttaggctaaaaccataatgaaaacagctgtcttcatttctcagaaacagtgagattgtgcaaggatgaggaatcacgctggatagtggagctgccatggtccccagctggggtgctgcccatggaaggtactggggatgtccatcaggtgcttctgggaaagggcccaggaagaccagacggttctgttcagtttattttattcacggaggcattttaatgggagaacagatctataattgtgttttaacattgtctgaaaaagggaactgaatctgagtgtctgagctgtgagcgtgaaacatagaaaggccgtggctaccaagagcagaggacagtgggttctgctggaagagggaggaaacttagagaacagacaaagagttaaaattagccctggctggaccatgtgtgccgtagaccagcagcaccctatgcagctggggcagccttattttagtctgtccaattttaaagcttctggcatttggttgtcttgcttccttgttttttctggggaagccagcagcagacaggtcaagaaggcaattttgccatcaaacagaactaggttcaaattcaggcaccaccgctttagaagccagggaaacttgggcaagagtcttcatttctctgagctgcatttcttctgtataatggagatgataattctgcctcgtggattcttctgaactgctgccatcatccgactagcatattttaatccagcaacgtttttctttcttggagcattggccacgtgcccacacaggaagaaagcagacacagttgctgtctacaagggggcaatgggcttactatctacttaacataagacttgaaaacagattaccacaacatgacaatgtaagttctatcatggaaaagggttccaccaaaatgttatagtggtcttggagggagaataaggggcagcttcatgaggaatataaaaacacagagccctgagctgacagacacacacttcacatgtaataggcaaatggtttcattcacagaattgtttcatttctgtggagggaaagctagcataggaaaaaaaccttcaactggttggtgttacgcaaattatgatggatgaaaacaaaattcttgaacctgtcatgggtctgtggagagacgtaatactgggagctgcagagggctcggaataagtcaaagctcgaggggctagagggtgtctggacggcttacatcataaacacatgctgtgagaatgagaaggcgtccctgaggacggccaggaggaaggctcaaggcatgagtgctggcgatgttgatgccatcaagacgatgagtcccgccgagcagccttccacagtgggtttaggaaatggcagccttgggagctggcccctgccaaaacgtaagccgaggaagatgagaggggcctggctgacagccctccggccatccagatctaggggcggtggagagagcctgggaagagcgagactccaagtccgagtcccgctgtgagtggtgtccagaacctggctccaagtcccttcctctgcgagcaggcagggccgacttctgtttgggatgtcccattctttgcctcccttgggccccctcctatgagtacagatgctgtcaccgtgggcagagatggctggccacaccaccctccagtcatgccccctctgtgctcattctcatcacccagcccaggggcttgacctctgcctctgggggatagcagagcactgggcccttcttatcttccgtgtgcctccccagcaattttctatgcatctctaaattacacccctacggccagtgccacttcctaactcgcctcaggacccactgtttgacttcacctccaacggccacgagcaaaatagtgtcatcgggtgccaacagcaaccctctttcttcccaccctcagcaatgtgggggcctttccgacagagcagcagcgagggtcccccacaaccctgggacagctgtgctgaccttcctatcagggccaccttgtagagacatcttgattaagtgctcctgttgtgtgtcctaccgaggatctgttttgtttttagtctgtgcacaggctcatttggcccatgcttgtgggccagaactgcttgttgacacagagcaaagagtgaatcctgccaggctgccgaggcctcggctgtcccagggcacgtgtgataaagctgagagcaaggaggtactctgagagctctggtttgcagaaagagagaaaagacaggatagatgaagagtagccaaaactccgtagaactggggggagttactgagcagacaggatggcatcacagagtgtgccatggtggggtaggagggcggccaacagggacagaggagggtcctctgccagggagagaaacagagggaatttgggggaaaccagttgcagacatgggctgagaagaccctgacctgccatgaatatgggcctatcaagtgagcaggtgttcgttctttttgcactgctacaaaggaatacctgaggttgggtaatttataaagaaaagaggtttattgggctcatggttctgcaggctgtacaagaagtatggtgccagcatctgtttctggggaggcctcaggaagcttccactcatggcataaggcaaaggggagccagtgtgtcacatggcaggatggggagcaagagggtgacagggaggttccagtagctttaataaccagatatcctgtgagctcattactgcagggagggcaccaagccacgagggacccactgcatgacccagacaccccccactaggccccacttccaacacagaggatctcatttcacatgagatttggaggagacagacatccagaccatatcagtagtgtgaacaatgtgaggcacagtggggtgcagtgaccacctaggcctgcagctcccagcggccagccaggttgagcatctgcatcctttaaactgtccaccagccctttccacgacaccgtgcttcctacttgctggggcagtgcagacagattgctactgatgtcatcgaatcccagggctgctggaaggcatgcctgcatgtcacttctttcaaggcacttacgttttatgcctcccgatctcctctgccttagctggacctggaaggacagtgcactatctctagacctgggcttatgcatctttgaaaatgcctttaaggttcccttagctcctgagggttcagcttctgcccagccagtcacgatccttccccctggcctcctctctggttgctggtgcagtttgattgtgcctttgatagatggccagggctcaccctcctccctccacttcctaacgacggggagaggctgacggctgaggtagttcctagaggactgtgactcttcactctttcttccgtgttgtatcccgactttagatgatgctgttctagacagtacagggaaagtgatagaacctagaatctgtccgtctccctcttcatgggccacctgagtaagtgggtgtgcacggttctttaccgagcttcagtttgggattgcctagggatctcctttgcctggctttatttctctcttgttaagaaaaagtcagagtttgctgcccaaaaaagttcctagagttattattggttaggttgaaattaaccaataatcattgtatctggttcatttacttcctttatgatgttgctcatttaagactttactcatcctctgcgtatttttaaggaaggatctgaaaaatgataagaggttagtattttgttattttatatttttagtaaatgtgacattctagttgagactaaatatgtacagacatggaacagagttaaaagtgtttatgagtgggaaatagatggaaataaataataaagacttatagcttgtgatttgttcagtatcacttagcaacatcaatatttttgtctacaaataaaggtctcctgtttggtacatgttgaaaatatttgtatgcttgcgtgtttgtgaccttgtgtacacatcatctccagcagaaggatcattttggttgtggctgggtttacagtacttaatttgggtgtctagacactggttatagtgacagaaaaacgtctgaagatgtgagacgagattttgaagaatggtgttcttaaaatatgtctgtaaaccgcctcttaacacagaaataaattaaattacagagttagaaaaatcctaaattaaaaggatgtgtttcttctaagataattatttgcgtgatttgaaatcactttttccttatcagaaggtgaaacatgatgttccctgagctgtgccgagaacagggagtgattcccattaatagctgtggaacttaattaatctttagttttctgacacctttattttctagttctttcctgatgcgggcttcctggctaacctccatttctactgctgataaccgcgtctgtccttcgcatggaaacattcgccttgccctggcaccctatgttgtgctgtgtgttttctacatgttcccccctttactgttcatacatgaagcaatctggattggccttgcgagcgtgtctatgacctaggagagtaatgtcaaccaactgccccttttgtcaggtggaaccgatttccctgaaattctcatctgtgcagttaattagtgagtgacctccccatccaaggctctctgagtgtctctgtgtagcccatttttaactctcagtatgttttatttcttctaattattctagtcacatagcatttaatcacatgatcccacttttgtctgctttgtgtttgaatagataatggaatgatcgtactttctctgcttccctggttcctgatacacagtaggcactctgcaaatagttattgagccaacagatcaaggaatacttcataagaagtacaagcattaaaaatgtttttatattcaccttgtttgctaaagttcagttgtttcaactaaaaatataattttcaatataaaaatattttaagttatggccaaagtccaaagttagcccatagcaatgtatgaaactcagaaggtaactgactagttgtttttacgtgtttttctaggtgtcaagggagtcaaatgaaacaaactagttgtatattttggtagtgctattttaagcatttaccttaaaatgtagctttaaatggagccttttctgttaatattttttttcacctttatgtagtcaggtctcatgtgtaagggttgtgtgttgcatgtgtagacggcatcagcatctacccctggctctccgtatgaatacctacacacctaagactcggggtccaaagacattctcaaacagatcttcacaattttttgctacaataacctattgccctttaataatattttatttagggaatactaatattcaggaacattatagcagaaattattttaatacctttgaccattaaaaataagattttaatgatatttccactctcacgttttcaaatggtaatctgtaatttatgtagacactctgccctcaaagagggagcctaaccctggctcctgacatgcggactgtgcattgtgatgcccttccacatgtacagcatgaaaggaggaaagagcagctgtatggtagagaaacctgacaaacactccaggtgatcacgccaacactgacgttggcgttacagtgctataatgtgccggaagtgacactctaccctgtggccctcctctcccaaacccttaaagttagtctaatcatgagcgaaaacagcagacaaatcccagtcaaggagaattctgcaaaatacctgattgttattcctcaaacttgtcaagatcatcaaaaacagagtcaaagacactgtcacagccaagaggagcctaaggagacacagtgactaaaggtgatgagacatcctgggtgggatcctgggacggaaaagggacattaggtgaaaacgcagaaaatagaaataaactatagactttagttaactttttaaaaagataatcagcaagaggaaagaatgtcattcagtggaaccatttaacctcagcactatctttctgcagtagttggggatacattttaagtctgattgcaaataacacagaagtaaaatgagtcacagcctaccttctccctccttcccctcatctcttactcttctttttctctttgtagaaatgattcagctggtttacttttgattaaagagcttatgttctcttacctatggaattcaatattagataaattgttgattttcagatcactgttttcattgtaaaatgggctagaaaatgcaaactataagtgtctattatttgttatttagccctataaggcatatagcagttgctaccctagggtgcaaagcaatgtgatcagttggtttttgagttgaaaaattacatggtctatctcattaagtaaagccaggtgtgtctcagagaaactcactgtaattagtcaaagacacagaactgcagatggaaagaagtttataaagtatataataattaaggtatagatgaggaataattgggacttcttggattattacttagagcttgtttgggagttgtattattttctaagaaggcgggaaagcagtttgtgtgaattattcttaccttatttttaatagcttcattggtgtcttccttgcagcttattatagagagaatgtgaatctgtggtaagcattagatttattctccatctagcatgacccagatggtagttttggaatgcattcctgcccaaactactcggagtcactgagatttatgatttgtgaactcataaattggataaataaaactcatcttctacagcttcagtgtatgttattttctagagttcatcgtgtctggaaacttgatttcagttaagctatgtattaagtacttggaatttctgagtctattgcattgttgtttctaggagagtggggaactttttttggtgaacagagcttaccttcttgtgactggtcattgtcatttctacatgttatcaggaggccctagggccttgctggaacaagtacttctgagttgacagaaattggattgctataaactctgctttcaagagccttaccatccagtgaagacacatgattacctgcagtatatctaagtctctttaattgtgtgaaattcatgggtgaggtttaaggtgggtgcacagggagagtgaggcttggtgcttggctatgcccgaatccagagaggcttttataaagaaaaatcatgagcccagatcaaataaccacatagaccaaggagagagaaataacttctgccttagagaacaaggaaagcttcacagaacagggagtacttaagcctggtcttttgaggatgatgtatttgagggaaagggagtgtccatgggtaaacaaagacttgctaatgggatacacgggaatatgtttggaaaaggccatgatggggagtggttgtcactggttgtccttgtccttgtgcatcatatcaagggtatgtagtttaaacgtgatttataactgctgatggtgaccttgatcacctgactgaggtgtattaggtttcctcactgtcaagttgctcttttcccccgtctaaagagaaccaccctttaaagggtgattaatgctttataaagggtgattaatagatattagcaatgcatggtgatgaaaaccaagcttggacgttacagcactttcatctggcttaaggagataataagcacggccaggctcagtggcacacacctgtaatcccaacactttgggatgccaaggcaggaggatcacttgagcccaggagtttgagaccagcctagccaacaccgcaaaccctatctttacaaaattaaaaaaaaaaaattagtcaggcatcatggcacatgcccatagtcctagctgcccaggaggctgagccaggaggatcacttgagcccaggagttcaagcttacagtgagctatgatcacaacactgtgctccagcctgggtgacagagtgagatcctgtctcaaaagaaaataagcaaaaaactagactttgtcttcactttgaacatgatcctaacctaaacttgaccttctcaaacactagtgcctaaggatggtttctttagacaaagccttttttttttgagattgagtctcgctctttcgcccaagctggggcgcagtgatgcggtcttggctcactgcaagctccgcctcccaggttcacgccattctcctgcctcagcctcccaagtagctgggactacaggcatgcgctaccacacccggctaattttttatatttttagtagagatggggtttcaccgtgttagccagaatggtctcgatctcctgacctcatgatctgcctaccttggcctcccaaagtactgtgattacaggcgtgagccaccacagccggcctagacaaagctttttatagggagacgagaaattgttaagaagtgagctaagaattgtaaaacacttagtatgtggcattgtaatatatgtgttattgtctgttgttaccatcatgatcatcaccatcatcacgtgcattgagtagctgaagaacctcgataccagacaccagtatgtccaaattcttgatgcccaatctcattattttcactttgaatttgaattagaagtaagttgttaaacaggaacaaaatctaatcattttttcaaggtacaaaaaaattccacatattgaaatataatgaatggttttgcaaactttgattggcactttaaaaggtgttggagtagggcgctctgggaaactgcctattgattgcactgttgtcagtttctaagcaaccattgccaaatttatcttcatgtcacacaacttgtgtgtttatccaagctggttgaaattcttacccttgtgcaaaaatagaccagggtgaatattgagtgggactgtatcggaggagtgggctgcattcctccatagttcccagtaggtgtcactctggcagaagaaaacaagacatgatgggttctgaagacacatccctggggatccgcccaggccacaggggcatgcagaagcaccacttgcctacctcagttcccctattcgtacccgacttctctggccagcaggggcaggttgcccaggccacgtggtgaagagcattcctggaaaacattgttctagacccacctggctacagacatcccagcttactcataaagcattaaagcagtaatagaggaagagctatatctatgtagctgtaacccgaagaattggcagcacttgctgggatatgggtagcaaatttttattcctagtaggatcggcacatgtatggctcagtcgtaaatgtttatcagctagctgaacgagtcccacgaggacttcatgtgtttctgggtaatcttccataggagttactgtttactcagaaatgcaaaataattttgctattagccagtgtaactaagaaaaattttaaaaagtatgaaaaatataaaacagtaagaaaaatataaaatatgaacacccaaagagaacctctgccaccattgctttctgttaataggtgatcaacagtaagcattacataaccttgaattctcccacccagccctccccctgcccctctacaagagcaagtcatcgggggccaccctgtgcactagggcaatcacagaagtgggaagcacaccagctccccagctaatgcgactcgcaggcactgaagtactgttactgtcactagacgtgccaccggcagcaccccagaatgtagtaccccactggctgcaagaccagcattagataaaagtaagcagggagtctcgatggatcaccactgatctttggtatctgtaaaggtgtcactgtctctttaaggaaagagggagtccctactttcatttttcctcaataaataatttttgactgattagtgacaaagggacactttagtgggtgatcagcacagcatctgcatggctgcttccttgtggggtttctgaagctgcttctgtgactcagcccctcaccaacaaacaaacaaatgagataaatcccagagacctggaagagggaacctgccttgaaatggcattcatggaaaaggtctggacacttcagccaagttatttgtataatttgttagttacatataaggcccaatatgctaaaaaaatgcaacaggattattagtctctatttgtctagaattgaaatttctaagtaggtgtgtgaatttatatgggtatgtatcatatatatgtgtatgtatgtacatatacacatgtacacatatatatgacaaatagcttacatgtatatatacatatagaaatgcaagtatatctgtgtacatatgtatgtatgtacattttatatatgtatatatatacatgtaagctatttgttatttcttctgtctagagaccaacatcacactccctgagagtcagaaaactgggttcagacagcagctctgcaaatgacttttccaggacattcgctaaatcactgcccctctcctggactcagttgcccatggaggagttggcgggagatctctgatgcctcttccagttcaaagacagcacagctggtacacagcctctgcttgtatccagacagcactttgctgcccctgaccaagaagtgcctatcttcaaaccaagatgttggtctgccgttgcataatcaacagggttgggcgttactacctagcaacaaggagtccctaatccagggcctttgctctgatagcttttgagtattatatgggtactttttagcttttggattaattggtagcagaaaaagtggaactctagttcctgtcatgcttttatttttttctttttttgatttacattgttcagagcaaatatagaaaccatggaattattttcagggaattgaagccctagagggtgtccccctgcttttgggtctgttggcctgagccaaccccatcctcaaaacaccccaggtgagactgctgaaggacgaatgtgcacagcccatgtcacaaggagtctgtccggctgctcaccttttctctgacttctgagcaggtgtttggaagctgtaggtaatggcccaatctcagagcccaaggggattcgggtctttcccctgcagactgtgctgctgtccttggttggtccttgaagggacctgcatcgtacctgaggctctgtgccagtggggatgacgggggctgatgtctcttcccatgggctcctatggatttgcccttcagatgacctggtagggctctgagtgactgacttaaagaccttcataacgccaaagtggcaagattttggagacagatttgtgtctcctcatccatgatttttgactttaatcttttctgagaagaccagaaatcagagagtttgtcttctcagcctctctgtgaaaggatctgctgagctcaagcttcccttttcagcgtcagctttttaagttgagaataataattaaagaaaactccaatctcaattccaacatcaagtgtccatgaagctgtagttgttgctgtggctgagaagaaagtagagaacagagtgcagacctgcggttgaaatgactcttggaagggcttgcaggtgacctgggagctagcaggtgcctaacactgtggctctcttggcacaaaacaacttcaagcctgtgtgaaataaaggaaaaccaggagcctcgttctgatttttatggagacacatctgtgtgaccttaggaaggtctcccaagagctctgggtttgtttcttcccctgtgaattggcttatgatgtgtcacttggccttacaggtatgtaaagctccccagttaccagatcttactgtctcagggaacatcctgcagatattcagggcccacactggagctattcttcaggttccacgtttgaaaggttgaaaggcgttaagagcgtgacatgaaatgagtgggtgaatttatttttaggaaacaatatataggtaattagttttggaaatgggcttccgttaacttatcaccccttactcttttctggggcatcatccagttatttttcctcagtcatagaatttggggcttttgaaaatgtctcttcgagaaatagacacacaccttgcaactccttaagatcttgcccttgtaattaaatttttgagcaccatttttatataggagtaaatgagataattaagagatatttcaagaaagagaagtatatgagaaaataaatggtttctgctgcgtgattaaacactgcagctgagaccttgatgagcagtcatttgttggaagtgtacttcatcatcgggagtggtgtcctgattatcgttcaagaaacatgttgggagaaggcaaagacggacgtgatgacacctgtgcaaagacggacgtgatgacatgtatgccgaagcgtgtcttgactcagtgtaggattgataccaacatctcttggatgttgtgggatatggagcattaaaatatacaataatttatgctagtggtgcagtgtaatgaggacttgctgtgaatctcaaatcgatttcggagaagctgaacctaatgttttcctgattgtcaaaccctccagtaatgattataaataaccactgttttctttatattagagaaaacctaaaagaaaaaccaaacatgttcaacaatgagcaacagtacaaaagaaaaagtacaaagtctagcatatccaataacaattattagctaattaattttacttgaccacctggtgttggaggcatccctctcctctctggcatggtagagtgagaacttcctggtcctatagatccaggcccaaatcgtggtcctgactcagtgtttttaagataatgtgtccttggacaagttgcttgatgtctctgagtttccatttcctcatctgtgaaaggtgatcatcacacctgcttttataggtagatgtggcttgctgtgagggtaaatgacagtgcagctgtgtttggtagagggactgtcatggaatcaccatccttgatcccggtgacccagactggccaccttgaggctttgaaactctcagccagctctgccaacctacatcagtgagacctcagcctgcctcgtttctccactcccttaactaggtccattactttgaaatttgttatcaatgaatttgtttacattttttaaattttaatatatttaattgacaaagattgtctctatcctgtgtatacaatgtgattatttgatacatgtatatacattgtggactgatgatgacagtcaggctcacatgttcaccacccacgcggtccgtcagagcctcagaacttgttcatcttataactgaaagttcgtaccctttgactaacatctccccatcgtccctaatggcccagcccctggaaacccccattctaccctctgcttccgtgagttccacttttttagatgcaacatgtgagatttaaaaaaatatccagtgaaggctgtcgatgggacattgatgaacctgggggctatgtgagctctgggctggcgcctacccctcccacccaaggaatctctgcttcccgggctgtgccctcctgtgtgatctgaagtagggaagtggtatactaacttttggaaacattcagctgccaagtttcctctgctgcaggctttaaatagatccaactgagaaaggaaggtagagcttgaaccaactgccaccctctatatagagacggttgtcgcctggtctagtgtaacaaatagagttctttgttagaagaggaaagaaacttaacccctcatttcccatttctgatgatttagggacagacctgatggtttaccaaagatacacctgaagctttactatttcttgtcactctatattttttagtaaaacttatttttatctttggagatgacaggcatctttgttttagggataactaattatgcctgtagagaacatgagcatgttcacaacccccaattaatctttaacccagaatccatagagcgttttttaggctgacagttagacccagtttaattgtggatggatggtaggattccagacacttcagatgaaaatccatccagccatgcctgtggatgccccttggaaggaggttggagcttgggccactgagaaggtggatattgcatgtcctgactccccagatctgtttacacaacagcgattttccggatagagtagcacaaggaaggaagtgaaagggggatagtcttcatttgcggagggtgagtctagggagcagaatggacatgttctgcagctttgccatgtgactcctttcagcacaacagaaaacatacagggcacagagcttccttactgaatgcctcaatggtcacgacattaatgcgtcagcaggactggaggatggcagctaggagtgctgataaacgggaggctccgtccttctcatacatcaataaacacttaagtgcctggcaaatgcctggccccacgggagatgtagaagccacaagaccgacccctgttctcaaggatctttaaacagatggcctctaaaggcccctcagtgattcttgagctatggtttaaacccccacagctaggttagagctgggccattttctttttaaaaaattatttttattttgctattatttacattttttaagagagtctctctctctctctctcacctaaactggagtgtgatggtataattatagctcactgcagcctcaacctcctgagctcaagtggtcctcccaacccagcctcccaaagagctgggaccacaggtatgcaccaccacacctggataattgtggtttttttgtaaagatgggggtctcactttgttgcccaggctagtcttgaactcctggcctcccaaattgttggtattataggcgtgagtcgacaggctccggcataggccattttcaaactcccagattctctcccttttgatgctttttgctgataattatagaaattttactttcctttttccctcctaaatggagcagtattctggtttggaggatggctgctattcaagtagtccttgtcagaagcaagcctatgttgttgtatctaaaggtaaattgcacatctctggcaattttccttgccagcgcgtatactgaagccatccccagcgctcgcctttgccaggtggccaggcctcagggtggggcttgcttgtctttcccctctgctaagacctgcatacttagtgctctgagaacctttcctcgcctcacctgctctccttggtttttctgtttttgagaatggaaaaagttcatttttgtgttcccattttctaaaaaaaaaaaaaaaaaaaaaaaaaactcacaaaaaagcccaagcctttgtggggtctgagtcgtggcgagtgcggcaggtgagggtgcgcagacccacgaccccgcctctgcgctgccgccccccttcctcctggcggggccgtgagtctggaaaccatttcccttcattgccttggcagtgctccagccctcccgtgatgatttccctgtggctggtcgggggtcattcaagtccaggtgtgccttgctctttaggcatgatttagattggaatctcctgccttctctgaagaacgagtgctttctgtccatacctcctgcctccccaaagaaaagaaaaaaacagacattaaaagtgaggctcagccagcaggaatttatagtcagagttgccccatgcatgtcaattatgcttaccttacaattttagaacacggagtatgtatttcaccctgtatgcccttgtctggaaaataaaggtaattaaatctcatgccgtcatgatttgaacccaaaacagcaatgtaaaacaaagccatacaccaaacaactaggttttctaggattatatctccccataaaacatcaagtatcctcagaggggttttgtaaaatcataatacattggcttttaggtcgaccagttgtccacagtagagggttggccaggggtgtccaggagtgggatgaaggccacagctgaagagaccatcttccctgatcccagacagcccctgtgacgggcctttgtgctgtgagggcctgaaccacagaagcgaacagccgttgccagcgccaagctgggccagggcccggccgtgctggcctgcgagcagcccgggcagacctccaggcagcaggacaaaggggcgctgcggtcctcagccacacagccagggtggcggggataacagccccttgtcatcgcagggttgtgacattggcatgagccgccctcacagctggaccgtcctggcgcttgtcttgggctgtggaacgagccagcccagctgtactgaaatgcccattcttttctcctttctcgtgcccctgtcaacaagcagacagacaaaagggttctattgtggctcatgccgtgagcataacctttctctgccatgggaaggagatgggtgtgctcaatggtggcagagctctgtacctgcacctcactttgtgtgtggaggggaattgggatttgtgttttgtagcctctaggacagagctcctccatgcttgcggggtcgcacattttggacggggccttaaggagtttgtgttgatattcaaaggaagaattccatcagcgttgatcaaacgtggctctgaagactgtgacgatgatgtcccatgtggcattaaacacaagccgagctgctgctccaaggcacgccattcgtccattcgttcagtccaacaagcctgggccatgaattttctctgggacccgcatcatctcatagtggggacacagaaatgctccctcccagcccctgctcctggggctgtggtgtctggtagagagggcaggtgtctaacatggttacagttacatccgcttggtgggacttgatgacaagactaacgggcagccaatgagacccccgtcagtgctggggagatagtaggggaaagggcactgagccaggacagtaagctatcccttggctcctgttcctgtctctggaaggtcagtctgtcctggaggagaagccaacacccatctctgttcagcacaacgggcatgagttttcttatattttcaataaagagcatgccttagacttttttttttttttgagacagagtctcgctctgttgccaggctggagtgcagtggcgcaatcttagctcattgcaacctccacctcctgggttcaagtgattctcctgcctcagcctctcgagtagctgggactacaggcgcctgccaccacgcccggctgatctttgtatttttagtagagacggggtttcaccatgttggccaagatggtctcgatctcttgacctcatgatccacccgccttggcctcccaaagcggtgggattacaggcacgagacgctgcgcccagccaagagtatgccttatattaaatgacagcaggtgtctcttggcccagtggaaataattgatgtggtgctatactatggctttatgtctttatccttgacacatgggttctccccacagtcccccaaaaagagaggatttaaatatgtataggtttacttacaaacatctgcccaaagggtattagagtagcatggaaagtggaaaatcatttagacttgttgaacttctgctttgtgctgaatactgtgctagaaattcaatggactcagtgtccctgtgaggagagggtcctgctgagctgatggggaagcgaagcccagcctggtgcagcctggcctggagtcacacagcgtgtgtgaaagagcctagaaccaagccgcgcctggcccaggggggaagcagccctgccagtgcacgcagacttgttcccgtgtcactgacctcatcctcatcgtgggttgctctggtttgccttggtcaatattaatcatttccccctgcctcccagcttcactagtttaactatgacgtgcatgtgcttttgtgggtaccctaagagtccaggggcgctgctaagaaagacaaatacacacacgtagggaagaaacacaagtaccttgcgtcttcctaatctaacagtgtctggattgcttcagattcctggagtagctggactgaaggcagagatgaggggcttgttgacctgggagctctttatagctaatgctgctcggcttcagttcctgaggcctgctgccgtagggcctgcctgcaaacgcactgtcaccaccccccgccgctgcagccccccaggagttacgcttttgcagaagacccagctgcctaagtaaaattaaacaccctcaagctgtttgaggctcttaaaaacattttctcagcactgaacttctctgaagatctgagactattagcacaaaaccaagagttctctctaaactgcttttctctttcccctgaatgcaaatgaacttcccctgctggtttccattcatctgacaggtcataattgtgacgttggtaaaatagagaaagttcccttttgaaaattgagctatgagaactttttttgttaaaaaaaaaaaaatagaatatttgcttattttaaaaatagagtgacacagtgataatggtgtcatcatttaaactctaccctataaactctagtttggacatgtcttggcttattggaaataatgaaagtattaacgctgtggattttttgttatagtgggtgtcactgttaggaattgtgagtcacagacatctggtcatcgtgccttcaacccacaagcagttattgcctcacattagaaacaagtttggccgggcactgtggctcacacctgtaatcccagcactttgggaggccgaggaggtggggggtggggggatcacctgaggtcaggagttcgagaccagcctagccaacatggcgaaacctgtctctactaaaaacacaaatattagacaggtgtggtgatgtgtgcctgcagtcccagctactcaggaggctgaggcaggagaatcacttgaacctgggaggtggaggttgcagtgagccaagatcatgccactgcactccagcctgggtgacagagtgagactccgtttacaaaaaaaaaaaaaagaaaaaaacaagtttgcagaaggcagcatggggctggtataggggccccactaagtcctcgaggatccaggttatctctttcggccccactctcccagcacttagtgtccagctctgaggttgtttcatggtctagaatggctgctggaactccagccaggacactcacactgcagtctggaccatggaagaagaactgaagtccaaaatgatacatgcctccttcctttaaagacccttcccagaagtcccacacaccgcttctgccactgtctcctggccagaacctcaccgtaaggccacaccagctgcaggaggaactggacaaggttccagtcttgctaaggaagaaagggaaggcagaataaaaacgagtgcacttcacgccccacatcaggacctgtggccttcgttataatttagggtctctgtatcacagtagacagaccccgtggttagaggcctgctgagtgtaggtttcaggtcttcctgtctcttaccttatcaagttatttaaatttataacatagccaagcgtgcgtctatccaggaagtgtgttcacatctagtcagcatggtcatcttgaagggctcagggaaagaccctcataccccaccttcaccaatcccttggtcatgaaggatgttggctcctctcacctgcaccctctacccaatgtgatgtttgtaggcaccccatgaataaacattttatgaatgagttgatattagtggattacacgagcaactacatcatttgaaaaaaaaaatgattataagaagctaagagaagttgtgacactaatccaatactgagatgcttgttttagatgatgtcatactttcatagcagacactagagaagcgccctttgccctcctccccactcctggggccttccccacacgtggcctcagaaacttctttcccacgcttgggcctcccagggccgccccatcctgcaggctcaggggctcagactctgaactattagctccatactagccctgcgctatctggggaataaaacactctctgtactcttgtctctatagaaaaactttttttcagttgcaggataagccaattagaaatgaattttgggcaccaaactgattcataagtcggatgttgcttatcttcactttactttaaaatgaattgcttttatgtgtctttcaaggaaaaaaatattctcaaaaaatctgtagcactaatgattagccttactttgggctaatttcccttttgatagaaacgaatgattgtaccaacaacttaaatttcccttggggctgggcacagtggctcaaacctgtaatcccagcactttgggaggccaagttgggcagatcacttgaggtcaggagttcgagaccagactgaccaacatggtgaaacccctgtctctactaaaaacacaaaatttagccaggcttggtggcaggtgccggtaatcccagctacttgggaggctgaggcaggagaatcgcttgaacccggaaggcagaggttgcagtgagccaatatcgtgccaccgcactgcagcctgggtgacaaagtgagactctgtctcaaaaaataaatacatgaaaaataaaaaataaattgcgcttggaagaataagaagttatttatatttagttttttgttttaaaagtatgcatggggaagcaagacagctgatccccatcaaaattaagctgctgggcttagaaagtgttttgggggaaggggttgtattttattttgcaggtggtttttcttctttttgacaaaatcattaggcctttgaaggacatttttgatctaagcaaagcaaagataaaaggtagtgatagaaggtgacgttttcacttgctccctaacacttgtgagtcaggcaaggaagaaggacagacgtgactcgtctgggacggtctgcaccggagcatgtggggggcctggtctgtgcgcaggtcagcccttctgtgggtagtggttttctcaagatgccactacctggctcgggtctccgtgaccttgtcctgcagctcgttgcctagacaaccagcaggcgggagcccagacgccggtccacacaggcagttatcagggccagaggagtggcagagactccagcgagcactggggcatccatggcacccgaggcttccaggcgcctcctgcccattccacacaaagcagaaatctggcagctggaagcagcatggtctcagccggggacctccttaatgagatacctaatcaatggggagatgccgctgatagtcacggctcccgctgcatggaaagggcatgctcttgattttgtacctggagagggaaatgaggagtcccagttaattgggagatccagcaagagcctcactctggagcctcatagtctcctgtgccagggcgagctccaccttggtgacagaaggcgcagccctctggctgcccttttcatttcttttctctttttcgtctttttcttttccttccttccttccctttcatttatttcattttcttttctttttgtagagtcaaggtctcactctgtcacccagcctggagtgcagtggcatgatcacagatcactgcagcctcaaactcctaggctcaaataatcttcttgcctcagcttcttgagtagctgggactacaggcgcataccaccatacctggctaatttttaagtgtttttgtggagatggggtcttgctatgttgcccaggctggcctcaaactcctggcctcaagcgatcctcccgcctcagcctcctgaagtgctgggattacaggcatgagccaccacgcctggcatgccctttctaagtgtggagtttgtgaatgtgtccactttcctcacactcccatatgcctggccaggcagattctcatcaaaaattagaaaagcagatgtttccatttgcaaatgtgtaagtacgctgtctatgatcactgaagctctgactcagccactgtggtcagaagctgggagccactaagttcagcacagctgccaatcccctgtagcttccagtgcctccaagaaccttatataaagcatgtgaagttggtcacagcccgtcaccctgtttctgccatctccgtccacagcccctggatattactaagaagcaagcactcttccatgccacactactgcctctggtaaccccataagaggaagacctgggctcatccccagcagggtcagagaaaacatgttctttaagctcacgcatgatggcgttgggtagtttgcctgatacaatgcataggccagtgttgctttggattctgaaaaatgatatagagcaattattcataaactttttatttatttatttattttgagatggattctcgctctgttgcccaggctggagtgcagtggtatgatctcagctcactgcaagctccgcctcccgggttcacgtcattctcccgcctcagcctcccaagtagctgggactacaggcgcccgccactatgcctggctaattttttgtgtttttagtagagacgaggtttcaccgtgttaaccaggatggtctggatctcctgacctcgtgatccacccgcctcagcctcccaaagtgctaggattacaggcgtgagctaccgcaccgggcctataaactattattaattaatcattgttaacctaagtgaagagtgttcaggattcattctttggaccagccagcattttaactgtacagtaagtcccccccttaacattgtcaatatatgattagaaactgtaattttaaatgaaatgacatgtgacaaaatcaatcacaaaaacaaagttgaaggaaacagcgttacccgaggacttgctgtatgtcatttcgtttacagttgcagtttacatgaacctatcggcagccttaagtgagcatgtactacattgggggtagtgaaatgggtttaagtttatagtgctttcgttgatggttttcaagtaacaaaagaaacaggcctgctgctgagccacccctggccccctttgcagccggctgtccttctgtgatcactgtgaatgtgaatgtcctcagcttccctgctccagggtcagtgatcggagtgcctgtgatgtgcttacagcctgggctgggagtggaaggaggctctggtttagcagataaagagaatcccttggcctttttactgatttttgtgtttgccttagaagatttagggatccttcagtccttgtcaagagggttcctgaatcttttatttggcttcaatgcacattgagtaagaaaccgcagaaggaaagcagggaagggaagagtcagcgggaggagaggagatttgcttctagttgtcttacaattcccatcatgcttctgagtaacattctcaattcccagagatcaccattttttagttaaattggggcttccgaattctagcaaccagcaggtgttttggaggtagcttgttgacccctctttcatccaaaagtgatcatttttacgggggttcctcacagagtaggaatttgttagcagtgcatacccgtggcaagagctgtggctaaagcacatgccctgtcccttcccgatagcagcagcgcagagggcacagagtggcgcaggcgagactgccacagacgccagtgaggccaggatgtgcttgatggctctgcatgcctgctctgtggggctggaggtgtgccctcctgtgctgtgtggatgttattagatgttggaaagctgcagtgttcatttgggaaggagttactgctctgaaaggtttgttctcctttattttattttatttttatttttattttattttatttttttgagacggagtctcgctctgttgcccaggctgaagtgcagtggcatgatcttggctcactgcagcctccgcctcccgggttgaagcgattcttttgcctcagcctcttaagtagctgggattacaggtacccaccaccacgccccactaatttttgtatttttagtagagatgaagttttgccttgtaggccagggtggtctcgaactcctggcctcaggtgttctgcccacctcggcctcccaaagtgctgggattacaggtacccatcaccacgccccactaatttttgtatttttagtagagatgaagttttgccttgtaggccaggctggtctcgaactcctggcctcaggtgatctgcccacctcggcctcccaaagtgctgggattacaggtgtgagccactggctgctctcctttaaagagaaggtttgttctccttgattctcctgtacagttttttcttaaaatttgtttagaaatctaggagcatgctgggctcacattataggtgacaggaataggctgacaaaacacacaccttgcataagccaacaagcattggactagaattcatttgctgtcagatttgggggcagtgacagtcttttggtagaattgtaatcaaaggaacaaactcagagaacaatctgggtaaagagactggtgtcaggttaagttcagatctgtagacccttctcaggtggtgaagccgagaccacagacacagatcctggagagggattagaagccagacattccgtgggtgacgcgctccttctcctgttcccatctccgcatttcctggtcaggaacctcatgaaagacagctgcattttttccaggctggtatctctcaccagagtgaggcttgtgggcttcatgcatagcgatggatacagaagccttggctgttggtgaagacactgaggtgtatggatatattgaccactgtggggaaggctctaactcttggtcgttccacttgctcactgctcttctttgatggttgagaaagtggtaggatgaccagatttgcaaaagcccatctcactattatcaaatttaatagtggatgttctgccgtctgctattattacccatggtttgcttttgtgtgtgggtattagaaagccttttagggaaaaagcagaatgtggctgggctacagctcctgaggaagccggccatggcagcactcttcccatgctgtccctgggcctaggagagcaaccgctctctgttcacagtgtgccgtccagacccctatttagatccctgtcatgtggtagttcatccacctggacatcttcctcaccatggcagcagctccttgggagcaggaactatgtcctgttcgtctttgtacccctagcacctgctatttaagaaggactccagaagcctcgatgtgcggcaggaccatggccgatgtgtctccctggcacctctgtctcagggttaactttcctcgctgcctgagagcccccggctttgacgctcatggagccctggcattgagtgtgagcacttcacactctacctctctcagttggccctccgaaatgcctcaatttaggagtggtgccccactgtggagggtattttcaggaccatcttacaaattattgtgaagtgttggaaacaaagagcttcctgcttcttttcaacctggttctaccatgttccaagctgtagccaaaaggaaaataaatcagagcttgaaactagcctttctgatgggaatatctatctgggacacccctccctttttgtctcttgcccccatacgtctcctccttacagcacaggctgtttgggaaggaggacaggatatgtcatctaactttttttccatccctagctgagtcactgattaaaaacaaatgaacaaacaaaaacctaaaaaaccttccagaaatacaaaggaaaagggtttgtttgttttttattttaatttttatttctgtaggtttttggggaacagatggtatttagttacatgagaaagttatttagtggtgatttgtgagattctggtgcacccatcacccgagcagccttcactgtacccaatatgtagtcttttatccctcacttacctcccaccctttcccctgagtccccaaagtccattgtgttattcttatgcctttgcatcctcatagcttagctcccacttgtgagtgagaacatatgatgtttggttttccattcctgagttacttcacttagaataatagtctccatccaggttgctgcaaatgccattaatttgttcttttttatggctgagtagtattccatggtgtatatataccacaatttctttatccactcattgattgatgggcatttgggctggttccatatctttgcagctgtgaattgtgctgctataaacatgcgtgtgcaagtatctttttcgtataatgacttattttcctctgggtagatacccagtagtgggattactggatcaaatggtagttctttctacttttagttctttaaagaatctccacattgttttccatagtggttgtactagtttacattcccaccagctgtgtaaacgtgttcctttttcaccgcatccacgccaacatctgttattttttgatttttggattaaggccattcttgcggagtaacgtggtattgcattgtagttttgatttgcatttcccagatcattagtgatgttgagcattttttcctatatttgttggccatttgtatatcttcttctgagaattgtctactcatgtcctcagcccagtttttgatgggattgtttgttattttttcttgctaatttgtttgagttccttgtagattatagatattagtcctttgtcagatgtatagattgtgaagattttctcccactctgtgggttgtctgtttactctgctgactgttccttttgctgtgcagaagtttttatgaagcaagtctttggggaggatattttgtctcataaaagttattacaaacatcaagaaagtggattccagccgggcgcagtggctcacgcctgtaatcccagcactttgggaggccaagacgggtggatcacgaggtcaggagatccagaccatcctgggtaacacggggaaacctgtctctactaaaaatacaaaaaattagctgggcatggtggcgggcgcctgtagtcccagctacttgggaggctgaggcaggagaatagcgtgaacctgggaggtggagcttgcagtgagccgagattgtgccactgcactccagcctgggggacagagcgagactctgtctcaaaaaaaaaaaaaaaaaaagaaagaaagaaagaaagaaataaagtggattcctcttccagtttcttgcctagcttaaagccatgtaattcttgccagctcacattgtgacttttctggctttcaacactttgattgggatttaccatttaattaaataagcttaggagctggagggtgggtgctgtccggggtcagttcagtcaacccctggttctctttgcacttcacagaatgtggattgtctctctgttcatgggctctgctgggctctctgagctcagaaccttcagatttgttgggtgggaccacagatagtcatggtaagtgcagtcatccttcccagctgtagcagggggatgtccggaggctgtggaaggtagagtgttaggatagagatggcgacagtgtggccatctcaggagggcctggggtgcccatgagctccgctcagagaaactgccagctgagcagacgggaggacctggctttgaaagaagttacaacattaagcaaaacaacatgtcgttgtctgtggaaaggaatccttagcataagtttttgaaaatatgatcaggtgtcttgacccaacacttaaaaagtgaagtccacagggtttaatttcctggtgatatttttgtttttatttgcggtttagcattttttttttaagtatccgaatttgcatgaggctagttttgtatttctgcaagtttcagtccatgtgatttgaagcagatgtcatagtcacacaaacagagtccataatgggaaagtcaactcctgggcatgctgttccatgcctacatggactggaaagaaatttgattactttgggaaattaggctaatatttcaggggttgtgtaatggacaacaaaggacatgttcagcagcttttgagaactgagagaatggaggattgaggaccctgcagcggcagtcctgagtctccaagcgcggctgtgttgagatgggtttgctggctgctggggaacatgcctttgctcagccgaggacagctttttactgtggtgatgttagaaatgtgggcagagtgagttatgactcagtctattgtaattagaaaaaagagcaaccactgagaaaagtcctcagagaaaacttaagaaatggggatgttcttattctcagaaaactaaaacgggaagtcattcttggtgatagtgaggggaaacgcaaaagcgaagggagaggggagctctgtgtgcggcgtctctagcattgcacagtcctctttaatgaataaatggaaccttaataaggaaaagtaccggctacattatcggttgcaaattgatttgctgtaggcaaattctaatgtagtttggccatgtgaggcgtacctcttaagaaaacaaaatcaggttgcctgaaaatggactcttgctttccaggtgaaaaaggcactggaaacaccacacagctttgtcctgtaatgtttccttactctggaatcatgaatgggcttttctcgtgctatatctaaaactcagctctgattattatgtttaaaaagaggctgtgcttactttccacacccaaatgaggctgagagtggctgtgaggaagggaggtcagtgcctcctacttctttttggtggggcaagcaggggagggagaatccatctctaaaaaccagtggttcttaacctttgagaatctgaagcaggccaaagactttcatcccaaagcaatgcaaatataccaagtctcatgtgtagttacggggtttgcagacccctgaagctcatccgtgggtctcagctaaaagcacctgctacaaactcagtaagtgctttttccccattaaataattggtggcatcatctgtctgatgaattaccaccttactactttattttctaattttaactgttatttatattcccctggaacaccttgaaattttccctaaaactagattgactaatctgggtccctccttgtctcaggagatggggatggtctcccacttccacctgtgccctccctggccagcacatcatcattgtcatcggaaccaccttctttgtaactgtcctcctccaagcagtgtttgccaagcatggtgctaggtgccagagaataagctagaggacaggaaagaagaaacacatagaagtattaaccttcagcggaagaaggcgtgcccacctgggagaagtgacagtggcgatcttatagagcctgtggcatgccctgcagatcgtgcacacagctgaataagatgctggtgctggcttcttagcgaaccataatatatttagcttggagcaacttttgttttttgctaggatgaaaaacaacctgaaactcaggatacatacaagagatcaaaataaaaaccatgaaagtacagtgacccatttaaaagttgtccgggtcttttttttttttttttttttttttttttgtcagagatcatggtagaccacaaatcgctgagttaataatataatgctatttggccgggcgcagtggctcacgcctataatcccagcactttgagaggctgaggtgggcagatcacgaggtcaggagatcgagaccatcctgactaacacggtgaaaccccgtctctactaaaaatacaaaaaattagtcagacgtgatggcacgtgcctgtagtcccagctactctggaggctgaggcaggagaattgcttgaagctgggaggcggagcttgcagtgagccgagatcgcaccactgtactccagcctgggtggcagagcaagactccatctcaaaaaataaaaataaaaaaaatataatgctatttgtttaaaatgatagtgctgatttatgaatgtgggaaatatctaaaaatatctacaaaagaagtgattattgaattacagtcatttgtttatatgtagttattatcaaataatgatcaagttgtcagtctctgatttttatatgtagtcatctgtgacacatggaaaatgtgtaagtgggcctgtccctttttactaggaagtgacttcctcctaccttctgagccaaagctctccagtctccacttagccaggggatctctttcttcatggatgaccagtaaggggagagaattccttatccccatgtagtagctgaagggcattatcttggctggtgattggcatggatgggaaaggccaatgtagttaaagtcttcctgggatcatagtgaatttcaggtttcaactggtggagacatatcactggacttagcttcccaggcaaagtcaccaaagattctatgtaaatagcattgaaatgccacctttgcctatcacaagaatgtatgcattaaagagactgttgcaagttatcctggacaccaccctgccatttgcggtattctttttcctgtggaaaaactagtgcccagttctgagtagccgacttctatctgaacttttgaaacgcagtctgtcatgcgttgtctgggggccatagacttgcccctctacagtgtcccttctcagcagggctgctgtccgatgctgtgagagccagggcccctgagtctcccttctagggcccctagtcacactgccttccttccttcctctagttcactgcatgtcagccataaatgagtctgcattattaacgtgatgcttttctcatggtctgtgctcatcaatttctcatttccactgacacttctcctcaggatgactttcagggctccaggctgctcttcttgctcccacttcctgtgttttattctgtgcctcgtgcatactgtgcacactccctgctcaaagccttcagtggcttttccctgaacaggacaggatgaagcaccagctcctggccttccctgctgctctggagaggctgcctgggtctaggcacagctgtggtcaccccaccttggcttgtgaccccaccttggctttcttggcttgtgaccttttcgtcatctcaaatcctttggcttttctgaatcactccctgggctctctgtgcctgtcaggtggcagcactgtctctgcagccagaggatgggccccagagggccagggatgcatcaggctgcttggttctcctgatgcttgatgagtgtcggctgctgctgggaggatgttcttgggatcagtttgaatggcaatgagaacgtcccacctcagccatctgcaggactctgctggaatgtgcaggcgatggcacggtggccactgctgacagaggcacagggtggccatcctggtccccagacttctcgggggactggccagcagtcacttcctttcccaggtgacttggccgtgcccttgtccagaggcagggctccagacttcttaatagccacaggtctaggaatctgcattttcctggcttatgaaactgtcaagctgtctttgaactacggctccctttctaatcaagcctctggcaaagagaaaagcagcatcgcttaactattagaagcttgcccttttaaaaataacctcttcagcgtctggttttgcaattgaataattgccaggttgctggttggtggatacctggtttgtgttctgtatacaggttgagtgtcctgtatccaaaatgcttgggaccagaagtgttttggattttgcatcttttgcagattttggaatatttgcatatacagaatgagatatctcggggatggggcccaagcctgaacacaaaatttatttatgtttcatatatatgttatacacatggcctgaaggtaattttatgcagtgcgtaataattttgtgcatgaaacaaagcttgagctgcattttgatgtgactggctcaggaggtcagtggtggactattccacttgttgtgtcatgtcggctctcaaaaagttcgggactttagagcatctcagatgttagattttcagattaggtatgctcaacccctaatacatttctgctagttgtttttttcttatcctgcagtctatgtacaggcctgtctctcattttctgtctctactgaactgtctggagacagtctagcatattcaaacagccgagctgctgcattctgttttccctgggtagaatctcctaagttctttggagccttctttctgggaacatgaaaaagggactcatgcagttataaaaagaaactagagatcatccagctataaaattgcatcttagcattagcttctgttttgtctaccattcattttctattcatccttgtctaaagtttgtccagcaatttgaacctggtaattttagttctgtggtttctattggctcctagacccttaccagtggttaaaaatacaaattgcaagcctgtcttggtgggcatgtatacagacaaagctgaggactttctgcactgctggatctgagaatcctgagctgagcagccatgcttaccagcaccttgtgcgtatggatgcatgagcttgtgtgtgtgtgtgcactgtacactcatgtgcagagctatgcacacacgtatgtgtgtgcatgtatgttcatgtgtgcatgtgtgtggtaaggggtggcagggactggactgcagcatttgacggtccacccccgcccatccgttacaaacatgcatgtatctttctgtgatttattccacactgaggggctgtgaaaggagcatggccttgggggcattataaatccagattggagtcagcccctagctctcatgcatctgtaatcaagtgacattaccccacccagcatcaatattttctactaaaatgggcatagtgatttatgccaaaaatgagggaaaaaacaaaaaaacctaaagcagtcggcacagggcctgacacagaagcactcagcaatggccagttttctttgcctttgaatggcctaaaagggcaagaggtgactggggagtgaaggagaaagatgaatgtgtatatcagttctgtgtgcactgtgctggaccataagtgggcatcccaggccgcagcatggtagctgcgccatcaatcaaagaactgcatctaaaccgcctggagtgggatttggctttgagagcagcctgccttttccaggcagatgcagttccctcccaggcttgcccgctaaggcccccagccgagggcagtgtttgcagctcctctgctctgtccacttgggttcctttgagcgatgggaggaggcatttgacaacacatgggcatcaatacctgtccccactgggcccaggagagatgcagcatggcaggaggcccacaccctcctcagccttgccacgagctctgctcctgggtggctcgcctcccatgtggctccacttcatctctgcacttatttatttatttttaatttacttttctagagacgaggtctcactctgtcacccaggctagagtacagttgcacgagaatagctcactgcagcctcgacctcccaggcgcaagcaaacttcctgcctcagcctcccaagtagctaggactataggtgcatgccgctgtgctggctaatttttaaattttacattttgtagagatggggtcttgctatgttgcccaggcttgtctccaactctggcctcaagtgatcttcccacctcagcttcccagtgtgctgggattataggggtgagccaccgcgtcttgcttgtatactcatctgaatcaaaccttaataggtttccatgctgaagagctctttttggtctctgggtctttttgattatttcacccgcaccataagactgtgaattatagctcttattttaaaatttatttactagccacagtggactagatgctatccaaaaaattagaagcttttgtaatattagtacaaaattatatataaatacatgtaatttaatattttagtatttcttttatattctctcatttttttctaaaacactgtgaaattgttagggcaatatttgtagtctaaatctgcagatgacaaggtgaggtggagagaggatggctgacagactggggcggcctcctgatggccacgtgtgtggtgactgacttttgttaccgagacctaggggagggacgtggtggtcacggcaccaactttgagatgcctaagatctagttagtagtactagaatgcatgggattgggaactttaaatgagttgtaaaaaataagtgttattagagttccaaaaagaaagaaacgagtttggccgctgagatatttagaggaacataatatcaccacgttcaactgataaattaaattttaagaaagattgatatttgccaaaagatatgaagttagagtaaaagaggctcggtggcttgaccagggtgtggttttcactctttcattcactgacaagtagtgttggggggcccggccgcgccgaagcctgcttgagtcaccgagccagggcgctgcggctccccactgctggcggagtcttattgttgtgtctctcgctttgcctttcacagttctggcatggcagggcttaatgaatgtcaggctcagagggaagagaatggaacctgcgagcactttctgccactcacagagcggggtcacctcgccctgctcccccagctgcctacaggcctgccgtgcccttcccatctccgcagcctcagcctggcttcccttgaggaccaccaccgcccttagcccatctcccacacccatcttgctgagagtgcaggtgagcccggcccacccgaagccacgttgcctcccatcacccttcagtgctctggggccacaggggaaagcctgtgaccggcgtctgcctctgcctgccttggtctcttcatcgtcataatgccctggactccaattgcttagggttgtcccagacacactgtgctctgtcatctcttaacctctgcttcatgacagtctttccccctggaatcttgtcccctctttctgtcatctgactaattattacttatcccttaagactcagatgagtggccacctcctacaggaagccttcttccactctctcttcttcccactgcttggcgcttcctctcctctcctgagctgagctgtgatgattctgtgatagccctgcccagctggtttgtagctatctgctatctgtctcctcttccttcccagacacttccagcttgtctgagaacaggagctcatccgtgttgttcccctcggtgactagcactgcacctggcgcccaggaagacttagccaatggaggaatcataggatggctcggtggagggatggctacaaaacctgtcttttctcatactcatttcttgttaactgtgcacaaataattccatattaccacttcttattgtgcttaatcctagggtaaatttaagttaagagtgtgctgtggggaagaaaggcaagttgtctgaagattattctgcagtgagaactttggatctgtctcctgatacactgtagaaccaggataaaccataattgtccaaatccttcagggctttccttccaaatgaagtgattaacttctgcggtaaacttcctcttgtccaggctccaggcttcgtgctgggcctgacagcactcaagctttgctgcccacgtaggcaattagggtgtccttatccttcggttccactgcctggtgaaatattagataacgaggacagagcttatcttacacgcgtctgagctgacaaatatggcagcctttcagcaaaaggcaaatgcagacgaggccttttccctggctggaataagaatgagcctcatgcgtgtctggccccattgccgatggtcaaatgcactcgacatgatttccatagcacccagacagcctgagtagctcatatctacctgtctagtcaatacatcagctttgctggggagagagcaggagtttgtcactggggctcatttctaatgcatcaggaacaaatctgttactggctctctttattctggcatgaatactgtaagctgcatgaatttatcttcggtgataaataacagtgccttctgggttctgtttttttaaaggggtctttgctaagccattaatattgaggtgaagagagaggagaagaaatggattatgcctgaccgtggagattagcagcctgctcaggtgaagggtggccacacttattaatgcactaatgagcaagcagggtcattctgatgattagtaattttggcaacataacttctgccccagatttgattaagccttcatacagacttcctcttccaggagattatcttttcaaagcacatttggtttcccactccccctttcaagcccattaggaaaattaaagcatttaattttagtgatgaattttactgatacagacaactgcttttccagattttctccaaatgtaagcacaattgctacatcaaccaaaatacctcttactgaacacaaactggcgttgtgtggagattgctgattcctggtaatatattacagaataataagctctgtgttggaaagaatatatatatttcaatattgaaccaagccaggggagcaaattaaataggagaactgaaagttagctaatatctgcaaacttacttcctcttaaatgaacttgtccatcaaaccttcagatttcccctactttctcccttaaagaaacagatcaaaaatatttcgtgatgcacaagctagctaatgtcacacagctgaagcactggagtgaatgaaagttgaagatatggcagactccttgaggctaaaattactgcaacctagatgttgaaaaaatacctagtaaagaatagaaactgagggcggggcatggtggctcacacctgtaacccagcattttgggaggacaaggcaggcagctcacttgaggtcaggagttctagaccagcctggccaacatggcaaaaccccgtctctactaaaaatacaaaaattagccgggcgtggtggcaggcgtctgtaatcccagctactgggaggctgaggagagagaactgcttgaacccgggaggcggaggttgcagtgagttgaggtcgtgccactgcacttcagcctgggtgacagagcaagactctgtctcaaaaaaaaaaaaaaagaatagaaactgagaagggctctgagggctctgagtcacagctaccattttacctttcccctgccaaccaagtgaagtcagattatgacagtcgctgtgccattgtgagaagagcctaggagccctgaaacagacacacatccatatatacaaggatctctgactttaaggcaagtcaatctcaaaacaatctggataccttaaaaatcaggggggaatcgttgagaggccaaggtaggcagatcacttaaggtcagaagtttgagaccccagcctggccaacatggcaaaatcccgtctctacaaaaatacaaaaattagccaggcatggtggcgcacacctgtaatcccacatatcaggaggctgagttgggagaaacccttgaccctgggaggcagaggtcgcagccagcctgggtgacagagtgagactctgaatctaaaaaaaaaaaaaaaaggaaaaaaaaataggggggatcagtatgtgtatgcacccctgtaacatcacactgtatctacttgcaaagaaaaaaggggttgggagttccaagtcatgggagtcagagacccagagaaatcagattgcctaggaagctggcaatatgaaaatattatatgtttattcattttctttttggaggtttccactcttgaaacaccaccgcttccttgggtcagagggttctcaaactctaacatacatcagaatctcctagatggctctgtaaaacccagactgctggcctcatgcccagagctcccagtagatctgggtggacctgaaaatttgcatttctaacaggttcccaggtgatgctgatgctgctgttctagcaaccacactttgagaacccctgccctaggcattgcattccagaactctctccatgttagacagtctcactctcatttagtttgtaaatattgagcccttaccagatgccaggtactgtgctagaagcagggaatcccagaaacaccctgccttggtctttaccgagaacagtcgacctgtcagattccctcacagaaaggaccccagtcaccctcagcctgcatgcccgctgagtggaagacctgcttattccaacgtccacacttcgtttcatagggtggaatcttcaagacatacaggcttagacaatttcaattacttgcttttccttataaggcagacctctttcccacctccaatagacacatgatagtaggttttgcagactaacctctctcttggatggctgggccttgcatagacttatgggtcctctgatcccttctgggccactgtcccagtggggctatttttctccaatcttcaggactgttgtttatgattgagcctttgctcattcataatcctgcttactggtatccaatcctttgtttatttccttagctttagaatgtctacaaaaaggggggaggtcactttcaatcttgaaaagttagtcctcaaataagtttatgtagtaatagccggtagctgatcttgaatctctttcatataaattggatggctgtttctctacattgccaacaatttctttattttagacttctggaacaccctgcatctggaatccagaaagcctttttgtatgagtcgcaccattttcttggttcctgtagaggatgtggtgctgagattattcatatcgggaaaaaaaaaccattctcagaagaataatttctttgtcctcctgtcccattgagaagctttgtgaaaatactgtgaaaagacagaattattttggcttgaagctgaaagctggtgacatgtatgctctaagtggtctcactgtgcgtgggtaaggggcctgtggcttctctagcacctgcttgggaggggctttcttctccttctccttttcaataatttcatcttgaacctctctattctgaatggaccagtgggagtgatacttttttacacagagatttatacataacataacaaatttgaaggctgggaaatgaatctattgatttcttcattttctgaaaatgtttggaattttatcttttttcagtgaaatattacaaataaatttacagatggggcttcattaaggaatgtattttaaaatatgtgatcaaaacgattcattattttttaaatttcagtttcctcccttgcccttagcatgttattttttttagggtctctggttgttacctcaccaagcgaagggacagcaagttccttttctccctctgctactcgccgggtgtttttgtacgcagcttccatttctgaaaacactttttggcctctgtgttcttaggattgaattgttcttgtgctgtcgacacaatccactcatgtcaccgctagtttcttgaaactatcttgaccttgtttcagagaaagtggcttccctaatcctacagtccagcaaaatttacatttcatgatgcacccgttcagctgtgtgctcactcagaaagctctgcggaatcatctagcactctgccatctttttccttttcttttttttttctttttttctttttttttttttgagacagagtctcgctctgtcgcccaggctggagtgcagtggcgctatcttggttcattgtaacctccgcctcccaggctcaaatgattctcctgcctcagcctcccgagtagctgggactgcagggttgcaccaccatgcccagctatttttatttgtttattttcagtagggatgaggttttgctgtgttggccaggctggtctcgaactcctggcctcaagtgatccacccatctcagcctcctgaagtgctggaattacagaaatgagccagcatgcccagcttgccatcttttttcttctgtggttggtttctgtccccaaactgtgatgggagaaggcaggtgaaatgatggttggatgccactgcaagctgccttttctgtgtgggctcttggtctgtgtacatggggccccatggcacactgagttttacctaggaaggcttcagctgttcattttcgtttgcaaatcctccgtggagacccagggagagactgcaggagttgcttcttatttcttgaccagggtttccgctcccatcaccgtggctttttggggagccttgctggtgtgttcctgggatggctgtggcctgccactgtgtcctcttacacaggagtcagccctggatgagacctgcagccctgtggccttggactcccacctttcccccaggctgggtccctcaggcatggccctttcccccagtgtccccttaggcatggcccagtttgcttggtagggcctgacactcttcagatggtgaagtcagaaagaaaggaaagtctaaaggagagaagcagctcagagaagggagaagagggtttgggaggaaagggaaagaggtgttgagaggttatgacgcccaggagaggtgaatgcagggagggaatggaggggcccaaggagtgacaggcagacggggtctctgatccgggggtgctgggcctgccctgcaatctgagtcacaaaagccagtggggaaagacaaggcaggcattgggtgtgcgagtgggtgtgcatgtgtgtggctgcgtgtgtgggggtgtgcacgtgtgtggctgtgcatgtgtatgggtgtgcatgtgtgtgagtgtgcatgtgtgtgactgcatgtgtgtgggtgtgcatgtgtgggtgtgagtgtgcatgtgtgtgactgcatgtgcgtgggtgtgcatgtgtgggtgtgcgtgggtgtgggtacgcatgtgcgtatatggagtacgggggaaggagatgtgggtaagggtttgtgtatgggagggtgtgtgggtataagtgtgtgcatgtgagggggataggtgtgtatatatgtgtgtgcatatggagtgtgggggagataggggtgtatgtgcgtgtgttggtatgtgtatgtggggggtaagtgtgtgtgtgtgcgtgtgcgtgtatgtgcacgtgttgtgtgtgtgcgcctgcacacggagagcccactcatacgtagcagaaaatcaaatggccccaaatcagaaacatggcgcatgtgagcatgccacttcttgtgtgcctgtgactgttcagaatgtacacggccctgcagctcccgaaggccagctctgctgcaacccctcctctgtccaacacagtcctcactggtgtcttttcctcttcaaatctacagcatttctgatctctgcaaacaatttaacccaaaaccaagttctggctgacaaggctacatcttgtttcttgtgcgtgattagcctcgagacccaaggagctccctgcccttgactgattcattctgtacctgctggacctggaaatgcattaaaagctcaggaaagcttactgatcaattgcactggagattgagtctggtttggggctttacatttgtaaagcatcttatgtgcaaaagtaatttgaaagaccaatttattatttctaattcagaggtctcattatcatcagatggaatggaggaagcagtggcatgagttggtgcccttgaggctggtgcttgtgttctccctggagttcctgctactctttgtcttcagatttttcttgaagtatgaattaaaaggagcaggagatcttaacccagtatcatgtgtgggttttagtggcttttgatcagggagttttgaggctgttttattgtccttgaacaattacagtctctgaaagcagaaagacagagcccaaatcttgtgctcagtttgcttgctgtagaattctgtgtcttctctctcttaaaataaagccatataaataaaaactcttggggattccttaagaatgtcaaaagtaatgattggtctaaattgaagactgttattgtagaaactggtttgctttcaaagattttttgagtttcatatttaatatcaccaggtagttagaataggaatgaagagattaagtctacatttgatttttctttcttcctgaagtcagctgcaacatgaagggatgtattccaaagagatgtgtgtgtatgtgtgtgtgtgtgtctgtgtgtgtgtgtgtgtctctgtgtgtgtgtgtctgcctgtttattctcgagagaggaagaccgcgacagaatgttaaaaataaagaaaacaatcagtagtaacccagtctaaaatagtgattcttaaccttgcctactaaaatcatctggggagttttaaagttaacagatactaggtctacctccttctgatttagttagcctgaaatgaaacctaggtattggtattggtaaaataaaataccgcagattggatgcaatctgcagccagttaagaatcactgctctgaacaatatatgcagtggaattccaggattgtgaggcatggagccagtgtagaactaagcggtcacttgtacgtgaggccaataaaaaataatgcacactttttaattgtatgccacatgcacatggattgtttgatttgattgttataacatcgttagggcatttgggggtaattataacattttatagatgaggaaactgaggctaaggaagattatgtgacattcagtcacgtaatttacagacagggtgtcgggttccagctcagctcattcaaccacaaggacatcaccctgggtcctcagacagagccaaaggtgcacatgtgtcaccttctgaattataaccttcgaccttgaaagatcttcactagtgtattgctggtttgttcccaatacagaattgagttttgtggaagaaggtggttttaccttgttgaataggaaggaatgatatatttgaatagctggttactttttcaaccagtggctttcaaactttttaaaccctgacccacagtgagaaatgcatcttgcatcataacccaatataaatacacacgtattgtaatgacaacaaaaatgtctcacaatacctatctttactgtactcactcagatatttcctattctgttctttcttttaaaactggttgcagtctgctaagtcgactgtcctaatagattgcaacccatgctttagaaaatactgtccaacttccttcctgtcttccctctgaaggccagaaaaaggaggtagcattacgattaggaaagtgaatgacttgtcttatgtagccacatgaaaagatctgtgtaggccaaagaatgattattattggtagagtgtataggaaatattattttaaatttgataagcctggttctatgtggtcaaccaggcttttaacccttttaaggacaaacctttcacaataaaagttgtaggtatgatttatccaaggagggataatcaatgttgtgctcccttaagtttttaatgtttcatttaactcttggaaacccaagataaaaaaatataatttgtagataacctagaaatattttagaaggaatttgtaattccttctataaattgtagttcccagttggaaagggagtggaaagagaccaaaactttgtggagcaattcagtttcaagcaattcttaagcatttagtatctgattctcacttttgaaacctgattgtgtcaaatgaggttctagaaagtgtattcttaaatttacaaagtactatttgcaaaataatattgttttatatttttaattgcttttttaaaaaatccagtcttggctgggcacagtggctcacgcctgtaagcactttgggaggccgaggcaggcagatcacttgaggtcatgcattcgagaccagcctggccaacatggtaaaaccctgactctactaaaagtacataaattagccggacatggtggtgtgtgcctgtaatcccagctaccgaggaggctgaggcagaagaattacttgaatccagaaggcagaggctgcagtgagccaagatcgtgccattacactctagcctcggcaacagagggagactgcgtcttaaaaaacaaaaaacaaaaaacaaaaacagtcttgtttctccagcaagattgttagctttttgcaagctgacctgggcatggatttgtcttcctgtcctttcctcgcgatgctttccacagtgttagttacagaggagactctgaagagaacttcagtctgaacctaggagtgtttgacctgtggcttatcaggatgtgaacattgggcagcctattttctattttgtttatttactttatctatctatctgtctgtccgtccgtccgtccgtccatccatccatccatccatcctatttatatatctgtctatctagctagctagctatgagataggggcttgctatatggcgcaggctggccttgaactcctgaacttacacaatcctgcctcagcctcctaagtagttgggactacatataagcgtcctttataacagctctccttcctaccctcctccctctttatttgtttgttgacttattttagagacagggtctgtctgtgttttccaggctggagtgaagtagctatgtacaagtgtgatcatagcacactacagccttgacctcctgggctcaagcaatcctcccacctcagactccagagtacctgggagtacaagtgcacatcaccacacccagctgagcagcatttttaaaattttcttttcctccaaagctttcttatatcctgattttccctcactatcctcatgtaatatttgcatatattcatacacacacacacacatgcaactgcattttatacacatgtgtcttggggtcccggagagctcagcgtgctggtggggttggtggggctggtgtctccagagtggtgatgtgaagagcagcacctcgcttagaggtagagcaggtgtgtgccatgagctcaggtgatggcagtggagcttacaggagatggcttgtggcttttccctccgttggtctgtcactctcagctgccactgtctgccactgtagggattccactgtgggttcaacttgttcttatgtcaggcaatgttgtttgtgtatactcataataagcactggttaaagagggaacattaatgctgaaatactagtgaggggtcgggtgtggtaacgcttgcctgaaatcccagcactttggaggccaaggcggacggatcacttaaggccagcatggtgaaagccatccctactaaaaatataaaaattagcagggcatggaggtgcatgcctgtagtcccagttacttgggtggctgaggcacaagagtcgcttgaacccggaaggtggaggttgcagtgagctgagatcatgccactatgctccagcctgggtgacagagcaagattccatctcaaaaaaaaaaaaaaaaaaaaaaaagaaacaggaagaaatactagtaagaagcatttgaaaatgataatcatagtcatactagaatgagtggggaagtgttctcttctccaaaaagaagttgtctggagggattggtggagaattagtattaactcttctttaaatatctggtaaaatttacctgtaaagccatcttggtctgggcttttatttcctgggaagttttaaagttactaattcaatctctttacttgtttcaggtctattgagatttgttatttcttcttgatttagttttggtcatttgtgcctttctagaattttttttcatttcgtacaagttatctaatctgttggcatacagttgctcataatattacattatagtcacttttatcattgtaaggctgataataatgttgcccctttcattcctgattttagtagtcttttctttttttcctatgtcagtctactaaagatttcttaattttttctgtcttgttcaagaaccaaattatgttgattttctctatttttctattctctgttttgttactgtaatctttgttatttccttctttttttcttgattttgttttaatttattccttttggtccagtgtcttattatagaagattaggttattaatttgatatctttcttaatgtaggcttttacagctataaatttccttcagagtattcctgtagctgtatcccataagttttggtatgttttgcttttatttgccttcatctcagagtgttttctagatttccttttgggggagaaatttccttgttattccatctttgacccatgggttgttctttttttgtttgagggtgttttgttttgtttttgagatgaggtctcactatattgcccagactggtcttgaactcctaggcttaagccaacctcccaccttggccccctaaagtgctgagattacaggtgtcagccaccacacccagccgaatccatgttttttttaaatgtgtatgttgtttattgcttacatatttgtcaatttttgaattccccattttctttctgttatgatttctagtgttattgtattttaatcatagggtatatattgggtgatttcaattattttgtttcatggcctggcatatggtctatccttcagaatgccatgttctactgttgtagactagagtgttctatagaggtccatctgttaggtttatttggcttctactgtgtttaagtcttctatttccttgtcgatcctctgccttgttgttttatctattattgaatgtggagtattatggtatccagctattattcttaagttgtctgtttttcctttcaattctgtcagtttttgcttcatgtattttggaagtttattgttggatgtatatatgtgtgtaactgttcattctttctgatggaatgaactctttgtcattagtaaatgttttttattatcccttgtaacttttttttgttctgaagtctgttttgtctggtattagtatggtcgcaccagttttcttatgactgttgtttgtatatctttttccatgttttttactttcaacctattgctatctttgattctaaattattttctatacatagcatatagttaaatcttgttctctcatccattctgacagtctctgccttttgttcatttcactcttatgtaatcttattgatgtagtttgattggcatttaccaccttactttttgtttcctatatgtctcatctttttttcttcctctattcctcctatactgctttaagttattttcttaatggttgctctcaagcttaacacacataacttgtcagaatctacttaagatttccactaaattctagtgtgagatatatacataattttactccaatatagctgttttctctttttttatgctctccttgttatacacattagctctctatgttacaaacctaacaatacattgttataattgttactttgtgtcattttatgtcttttaaataatttgaaagaagagatgagaacaagcatctatttatagcatgtcttgtattagccttctaatttaccttttctagttctcttcatttgttcctgtggatttgagttaccatctggtaccattctctttgcctagtacagctttgctcccactcacctcctctgtgttgtcatcatgaaataaattacatttctacatgttattgggccagtggcacaattacttatgcatatatttgttttaaacaattgccttttaagttaattaagagaagaaggaagaagaaatgtacatttacactatcttttatcattatgcagttatctttcctggagctctttgttcatgcagattcaaattactgtctggggttacttgctttcaacctaaagaaattccttttgtatttcttaagtgagtctactagcaacagtctttcagtttttgtttacctaggaaggtctttatttagtcttaacttctgagagatagttttgctggatataaaattcttggttcacagtctttttaaataaatttcagcatatcaaatatgtcatcccattgtcttctggctttcattgtttctgatgagaagtcagttgttaatcttaatagggttatcttataaatgatgagtcatttgtctgttactattttccttggtttggctgtcagcatttttaccatgatgtgcctgttttttggtctctttgaatttatcctatttggagtttgttgtaattcctgagtgtatagattaactttttcaataactttagtacattttcagccattattctttggatttttgtttctgctcatttctctctctctctctctctctctcctttcctgtggtactcctaatgtgtatgttggtgtgattaatgatgtcttgtgttttttatctaaggctctacttgtttctcttcaatcatttttctgttactcagagtgcacagtctttatcaatctataagtttgctaaatctctcttatgtcagtttagatctactgttaagctctagtgaattttttattttggttattgtattttcaacaccaggcattccatttggttttttcacagataattctatttctttattgatctactgttaagctctagtgaattttttattttggttattgtattttcaataccaggcattccatttggttttttcacagataattctatttctttattgatattctctgtttgatgcaacaatgccattttaccttgctttgcttctttaatcattgtttccttgatttctttgaacatacttgtaatggctattgtgaagtttttgttaagctggatatctgggccctcccacaggtagtttctattgcctgctttatttcctgtttatgtgtcacactttcctttgcttgtctcattttttgttactgaaaactggacattttgataatatattgtattgactcctctagagacggattttctcctcctccccagaacttcttgttgttttctcatttatttagtagcttcgttggactattttattaaagtctgttttccttgcaatgtgaagcctctgatgtcactcctcagagggcacagccttggatatggcacagtcaccctgggatggcagtgattttagcagagctctctttgtttctttgcttcatatttctgtcaagctgtctgccttagttggtatcacacccagctgttagtttccactaattgctggctaattgctttattgttttcctctatgcctggggcataaatcactacagagtctgatccaactaaattcaggcccctttgcaggggtcatttttgatctagcctttgaggtttgttctgaccccagaaaggttcttcttaactgtctctttctctgattctctgtaaaattgctgacctagagttaagcttgtcactctcaaagagctactagcctcctctcaatttcttactaccaaaatttctacagtttttgaaagcacccttacacttgagcttcctcacatactgttctaaataaagtaagttttcggtagcagagctttggaactctttgttcttatggcctgcctgtacactctgggcaaaatctctgagttgatgctccacagctggagtggggacattagctcacttctctgagtgagccctcctcaactttatgggcaggatgggcaggacactgggtagaggtagtagccgctggtctttttagcttgcctctccttacatggaatttccaccctgtgaatgaactgggctagaagcagttgggaccatgctatcattagcctgccattcctcggatagatcttctgccctaagagtgggggtgaggaaggggtagaacaaggaaggccaagtggtaataggaagcctatggcctcttgactgcattcacctgtaatttaacctctgcaacagggacgtgctgtgcttgcctttcactggagatgccataggctttgttgggaagtggggagagaggaaactcttgtttttttgccacacccactcagtgtagatcttccctgtgctgaactggggaagggagagggaaggagtgggttgtggctcaagtgccacagactgtcactgttcttacaatggaagtaagagattttaatagattttcttgaaacaagatatttattaatctgctgaaattcccttggacaattttcagagactcaaaatggttactcttttacataatttcagcaattatggttgttttcctggcaagtgagtctgtggaacttctcagctcactattctttgagtctccaattttttttttttttttttttttgagacagagtctcactcagtcacccaggatggagtgtagtggcgtgatcacggctcactgcaagctccacctcctgggttcacgccattttcctgcctcagcctcctgagtggctgggactacaggcgcccgccaccacacccggctaatttttttgtatttttagtagagatggggtttcaccctgttagccaggatggtctcgatctcctgacctcgtgatccgcctgtcttggcctcccatagtgctgggattacaggcatgagccaccgcacccggccgtgagtctcctatattatattttaactgtgttaaagtttcaaacacaatatatatgtggacaagtcatgtttttcttactaattgattgaaactaaattatacagcaaacctttcttttaaatgagcaaaagaaagaaaattatctttatattctataaataacattaaagattgttttggattttattatatatcttttaaaaatagagacagggtctcactatattgaccagtctggtctcaaactcctgagcaaatgaagcaatcctcttgccttagcctcccaggtagctgaaactataggcacataccactatacctgtaattttattatacaatttttaataatatgcttgcctcaaatgttttatttaaaatatctagcatatcaggcctgtgattttttggatattgttacttagaagttaaattttttaaaaaatgaattaattgaagtccagtttaaaatcaatattaaataaataatagaacatgtggagtgcaggtattttaagaatccttagggtgggacttgaaggacttggactgaagtgtgcaagacattgatttggtcctagcaatgaaatgagacatgtgaggactgcacagctgtgtgactcaagatgtcactttcagctagcaggacaggtggcactagaccctgggtctcctgaccagcatccaactgcatcaagagtcactaaagccaaaatgttccaggcataatgacagcagacagaatctgtagcctaagacttccagggcattcagctggagtctgatcaaggttcgccatttgctgttttgtctgtttgagctaaaaatcaccaagaagaccatgtgtgaccaaattgccaccctgcagccaacctttgccaggatttctgcctctcagaggatgaatggtgatagactggtttggaaaatttttctgtaaggtatattataggaaacaaaattgtaaaggtatttgcagtattaccatttctaagcttgtaaatttttttaaaattacttttatttgtataaccaaaattagatgggtttctgccagagtagcattccttctatgaggactctacatttttattattaacactctattttactgtatttgctttcctgctgtgggtatttactatgttgagaataacagacttaattaaggtcatttttaatcaaaacaagaccatgtttctccttatctgcataaaaggcactatcaggcctttagggaggatgggcacctgttctcctaaccctttggcttctgtccatttcatggtggcaaggtgtcatcataaagtccagtcgatccatctccattatctctggttaaccaggggcctcacattcacagctaagtttgtcatgtttccatttgtcagccctgtagaaatattttaaacgcagaaatctgatgttataatgcatttaacaatgatcatttatccaaaatctatgaggaatgtaaacaaatcaatgagaataaaacaaataaccccactaaaaactgggcaaaggacatgaacaaacacttctcaaaagaagacttacaagtgaccaacaaacataggaaaaaatgctcaacatcactaaccataagagaaatgcaaatcaaaaccacagtgaccacctcacagcagtcaaaacagctattattaaaaagacaaaaaataacagatattgacgaggctgcagagaaaagggaacacttccgggcatggtggcgggcgcctgtagtcccagctactcgggaggctgaggcaggagaatggcatgaacccgggaggcggagcttgcagtgagccaagattgcgccacggcactccagcctgggcgacagagtgagactctgtctgaaaaaaaaaaaaagaaaaaaaaaggaaaagaaaagggaacacttacacactcttggtggaaatgcaagttagttcagccactatagaatgcagtttggagatttctcaaagaactgaaaatagaactaccattccacccagcaatcccactactggatatatgcccaaaggaaaataaatcagtctaccaaaaagacacttgcacctgtatatttattgtagcacttgttcacaatagcaaagacatggaatcaacctagatgtccatccgtagtggatgaagaaaatgtggtacatatgcaccatgaagtactacacagctgtgaaaaagaatgaaatcatgtcctttgcagaaacatggatgcagccggaggccattattctaagtgaattaatgcagaaacagaaaaagtaaatataagtattttctcacttatacatggaagctaagcactggatactcatggacatagaaatgggaacaatagaaactggggactccaaaaggaaggaaggagagaggtgggaaagggctgaaaaacttcctatcgggtattatgctcactgtcttggagacaagatcaatagaagcacaagccccagcagcatgcagtataaccttgtatcaaacctgcacatgtacccccgaacctgatactaaaagtaaaaaagaacttgatcgtatcagacagtttagtaggggttagaatttcaacccaggatatctgactgcaaatccacatccttcccaaagcagtatattggttgctttgggaatcatcattggtggtgggatggggggaattttatcagacatcattcttaaaccatggcatttaatttttttttttttttttttttttgagatggagtctcactctgtcacccaggctggagtggagtggcacaatctcagctcattgcaacctccgcctcccgggttcaaggaatttctaactaatttttgtatttttagtagagtctgggtttcaacatattggccaggctggtctcgaacttctgaccttaagtgatctgcccaccttggcctcccaaagtgttaagattacaggtgtgagccactgtgcccggcctaattttttatttaaaaaataaaaagaagaaaaactagaaattaaaaaacaaataaaaatttgtcatttcagtactttttcaagtcacaaataagtaaaatattgaactaagcaatccctccaggcacatcatggctttcagcattggaacaggttccaaggaatcctattggagaggacatttaatgggaggacatcgctatatgttttcagtcagaaagaaaagaaaggctatggacataacaaatttaaaacagtgaaaaagaaaagtgttgagggagcttttattctagaaaactctgatttttataaatatttaagtttttaaagtacctttttatactctattacagaagcagaaacttcgtctttttagggcccaagataaggaaaaggataaaagacaataaccttaaatttccagaacacaggtttactttaacataaaggaaaattgcctggtggtacagtttgtttctaggaccatcttccctgaggagtgaagaagttctttcctgatggtccacttaaatggtctctatgcacttccagagcttcctagcttccctggtctcagagaagtaaaattcattcctcgagccttttaaatgggacttgttgatcaggagccttctgaagggtggtcctcggatcggccacatttagagttggactgatgcagtggtgaggaacaggctctggagtcagtcttcctagttcaggtcctggcattgccagttactgctgtgtgactttgggcaaattacttaacctttctgtgcctctattctctcacctgtgagattgggataataactagaattcatctcatgatagttgtaattattaaatggcctacttgaatgagttagagtgccctggagcactgcctggcccacaggaagcgccatctcagtgttagttgttgtcagtatttaggttaggcacccctcctgtgtgctcctgcagcacatccgtcactggtgccttcacccactccacgctgagcacgctgctgggtgccacgccaagtttcacaggcctcacgaccccgctagctcttgctagagatgtgaagcagggacagcagggacaagggcggttcctggctctctttgtctcctgcagtgcatcgtggtggccggcacatagtaagtgcttagcatttgctgcctgcagccctggagctgacatcaaagagactcaacctcaggctggaattttctaaaacactcgagcactggagagccatgaattcttgtcttcacagcatctgtgtgtcaggctagtcttaaatgctgaagatgaaaacggagtatagttatataggtctgatgtcaaggttgactttggactagcttggatttttgggccatactttctctgatatatggcttagtatatgctccagtataaaactaaaaccctggaatgtgccttgactttatcacaacttttgaagaaatgaatgatttggccaagctaaaggtcttggagccacctggacacatcctgcagtttataagcaagacagagaggagctacagagatgacagtatgtgccgcttaggacgggtgcaggcctgctgccctaacagctatgggaataacggccccaggggtgcggtcacttggcaacaacctggaccatcatgagcaccacctatgtgtgccatatactgcgtgtgtgcaagaatgcgtgacatttgcctggattaaggagctaatgaaactggggtttcagtctctcaaggggcagttacaatttttatggggttaaaaactgagaactagaatagcagtatctaactcctgagttaataaacatctcgagcctcattttctgtggtgtacccagaaataagatgaattacgaaagttattcagccttccattttggggatgaaagtgaaaattgtgatatatttaaaaagcaaaataaaatattttcctgagtaactacatcaagcattttaaacagtaaaatatccagtgtgtttttctataggaaaaacatgtttcacctgataatatgcagatttctatcccccttcaacaccctcccacccagaagatgtactggcagttttctgaaggcactctcagtatgccttgttgataaagaaacatttgggggcgtgccagcagccaccaggcaggcaggacacatgtggcaggagtaggtgctgcttccagaatgctcaagggccaggacccttcctggcatctggctctctcaaggaacaggaaggccgaggcggggacagagagaaagcggggccaggctcatagggacggaggcttggcgtcttcatcattctgtctttacaagaagtctgctcctggcacttgagtttgtccagagcgcagaattagagtgttctcttaacatatggtgtccagaaatcctgaaagacttcttgagtttttaagaaggatgccaaatattctagaaatagtgtctcaacactagagcctctgttttaatgagacagggtctcattctgttgtgcaagctggggtgcattggcacaatcacagctcactgcactctcgacctcctgggctcaagtgatcctcctgcttcagcctccggagtaactgggatgacaggcctatgccaccacacctggctaatttttaaattttttttgaagatgtggtctcactgtgttgcccaggcttgtctcaaactcctggcctcaagcagtcctcctatcttggcctcccaaagtgttggggttacaggtgtgagccactgtgtccagcccagggtctctgttaacataagccagctagctttgccattcttggggaccttaacgacactgttaacccctgctggttctcctgaaaggtgcaggtagatcaatcatgacccatcagcacagagcggaggacagcaggaagcacctgccatgcccaggaggacagtgttactgctctacctacatgtgcacacaaactctgtttgtgttgaggttgagtactgttctttaaaatcattgttgaatgacaattagcaaaaacaagagccctcacatgtcctcgtggtggtatgctggcaccacgatttctccaagcccccggcttgctcatttcatccaggtgaggagtctggagtagagcagggcttctgaaatggtgacatgcacatcactctcctgggcatctggttaacatgcaggctccagttccccaggtctgggcggggctcaagatcgcatttctcataagctcccaggggatgctgctgctggtggtctctggaccacactctgaggagcgagggttggatgcgttatttcatcctcctgaccaccctgtgaagtaagtattctcagcctcattttatagatgaggaaacgcacccagctcaacctaacacaggtggcagggttggaacccaacgttggttctaactggcctctataaaaactttatactgcctcccattttcttctggggcttggaagggtagctgcaatttcaggcacaaacccacttaggaggtagcttagccattatgaaaatctataccaccataaatgtggactcataagtaattccttttttccgcttagtagcatagataatgtgtaacataaactcaaatctgctaattcagggagtctttttgcatattaggaagctattttaaagctgtttaatctgaactaatttatttaatacatttgtaatccgcattattggcttgctagctccatggggtcacacacttttatatttgttaacattcctaccagacgacagggctggtgggagcacacgcagagcatttgcgtttctacataaagctgtctctgtgctgcgtttttctaagttccaaggatacgctagaagattattccatgttatagactaatgtccacaaatatcaaactatttccatgttttgagtctgtgggaacataaagtttgtgttcttttaaaatcctcattcatgactttaagcataacaaactgacttaaaatgtactgtttctaaaggccaaattccagggattaatttttatgtggaaaatttcatctcagagcaaaattttatagcatagtcgtaaacctcaaagaatgggaatttgtaatgggcagagccatcgattcttaacaagagctgcattaacaggcagacgagacacataaaatggctccaagagcctcatggcaacatgtggagatgtagaatcttttacatggatttgcaagtaaacacatcctcttagtgccccaaaaaatcgggtaatcaggctaaaaaaatcaaagtaagtcatcatcagtccactggcatcctttggttagtttcagtggttgctacatttgttgactgttggctaattaattctgagcttgctaccactgagcaaaacaatgagtgggtggccggatgggagtgtcagagtcagactatcccggctccaactcctagctggcctctcaccagcagtttgcccttggacaaaagactcaccctctctgagcctcagtttccccatctgtaaagtggtaacaagaaaaatgtgcctcacagggttggcatgaatataagagatatatagtgcttgaaagtgctttgcatatagcagtaaacctttatgaatgtttacaaatgctaactttatgctgcagaaccattgaaaaggtatttctaattctttttttcttattattttattttactttaagttctgggatacatgtgctgtatgtgcaggtttgttacataggtatacatgtgtcatagtggtttgctgcacctctcaacccattatctaggttttaagccctgtatgcattagttatttgtcctattgcccttcctccccttgcctcccccagcccccaacaggccccactgtgtgatgttcccctccttgtgtccatgtgttctcattgttcaactcccacttatgagtgagaacatgtggtgtttggttttctgttcctgtgttagtttgctgaggatgatggtttccagcttcatccatgtctgtgcaaaggacatgaactcattcttttttatggctgcatagtattccatggtgtatatgtgccacattttctttacctggtctatcactgatgggtgttcgggttctttccaagtctttgctattgtaaataatgttgcaataaacatacgtgtgcatgtgtctttatagtagaatgatttataatcctttgggtatatacccagtaatgggactgctgggccaaatggtatttttggttctagatccttgaggaattgccacactgtcttccacagtggttgaactaatttacactcccaccaacagtgtaaaagaaaaaacaaccccatcaaaaagtggatgaagaatatgaacagacacttctcaaaagaagacatttatgcagccaacaaacatatgaaaaaaaaaaaaagctcatcatcactcatcattagagaaatgcaaatcaaaaccacaatgagataccatctcacgccagttagaacggcgatcactatttctaattcttcaagtgatctttatctgcgagaatttctgttgtgagtgaagcacccgcggtggggcaggctgtggagggggaggcaactggagggggaggcagcggggcataccgagaagccctgggggtgagagctggggctgggacctgggctgggtgagatgctaactgggcttagagatgacagttacagattctgggcgagcagagcctccctttaccactcagaaatttttttctgaagctaatgagctctgagtagccgctgagctactaacttaccatacttggagtggctggatgagagctgaaatctcagctgatcacctccaatcaaatccctggcttaggctgcctctttttggccattcaggacagcaaggttccagccaccttagcttctcctatgcaggtctcaactggtagccgatccttaaagcccgtttggttccttaaataagcaactacctgcagatggaacctgagacgagctcagccacacagaaacgcttatctgtaggacttcactgaaggtccagtgcgtttcctcctaaggactgtaaacgctcaggtaaatatttgtcagatggattaatgaactgaagacctttatagaggaaaccttgaagagatatcgttagaatctcaagtccttgttgctaccaacaactcttgtgaaagtctttggtgtccctgccttgctccattttcaaggcccctgctgcacacacagatgcctcctaagctctgagatgcgttggtgactgcacaaaactcatattagacgtgatagccatcagagtacttacgtgaaagatgcgatgtaaagatgatgagggaggagagagtgccgaatgcaaatgtttttacactttcatatttgtgtgttccacagacttccctctcccatgcccttctgctatgtgtgctgccattttctctgaatgaagggaaaagaaatattggcagctctcagctaaaattcccagtgatggacgtgctgtcatgcagccagggtgagctgtgtatcagggcatgaaccctgagtcacgacttgacctcggaacttcctttctgaagcaccatcttcaagtggtgcttaaaaggaataaaaacaaaactcaagagcactatctagtacatccgcccagacagcccctcagaggcgctgggagaggccctgtgcctgtgtttaagccacacatcccaagacagactctacaccatgtccccagacacccacaggagcgctcattatgcgtgtgtgtgtgcgtgtgtgtgtgtgtgtgtgtgtgtgtgttaggtgtgggcaatgttttcaaagtaaacttgtattcataaagtcaaaagttttgaaagtggtttttaaacaggttgaactgtgagaacattaaactgagtgggcaaggagcttaattaagatcggctccatggccgggcgtggtggctcacacctgtaatcccagaactctgagaagccgaagctggtgggtcgcttgaagtcaggagttccaggacagcctggccaacatggtgaaaccccatctctactaaaaatacaaaaattacaaaaattagcccggcatgttggcgcacgcctgtaatcccagctactcgggaagctgaggtgggagaatcacttgaaccggggagacagaggttgcagtaatcagaaatttcgccactgcactctagcctgggcgacacagcaagactgcatccaaaaaaagaaaaaagaaaagaaaaagattggctcccatggccaagatgcccagtgacagggaagctagccaaacacagtaagtgtgttgagacactggggaatagctgatggccgttaaatgaaagaaaaaaatgttgattttctttttttatatatgaaatattcattttacaccatgttaaatcccagagcgggctatttataaccatttcaaaatgcaaatatgttcattagcaaaggagagaagaacttttccagttccatgaagttcaccaaagccctaattttttttttttttttttttttttttttttttttttttttgagacggagtctcactctgtcgcccaggctggagtgaagtggccctatcttggctcatggcaacttctacctcccagttgcaagcaattctcctgcctcagcctcctgagtagctgggatcacaggcgtgtgccaccacacctggctaatttttgtatttttagtagagacgggtttcgccatgttgaccaggctggtcttgaactcctgacctcaggtgatccgcccacctcggcctccgaaagtgctaggattacaggcttgagccaccgtgcctgccccacaaagccctaattttaagaaacagacaggtacagtggcctacagcgctcctcactaaggccctggcttgagggcaagcctatcatgtgactgagcctgaccaggaagtgctggcccaggtggcaaggagcctcggggctccagggacaaggggcgctggtagccagggaggggcggcttgaagtggctgcagcttctaattctttctgaagctgcctctttctgagggtgactccctcttcattcacccagcagggtgactctgagaagtcagggaaagtctggcacagggaggggagttccatttttaattcggaaattgctcaggaagaatcataccatccggatttccctcgcggctgtatattaataaatggtcactttccttgctgaaattctctggtttccttttatccacgtgaagcttctggaaactcttctgggtggttcttctgttgcttttctgcccctgcccccaaaaatgagaacatgagaaagtgatgtcttctagccacctggaggaccctgcggtgacatcagggcccagtccctgctgtcatgccccaggtgacgtgctgggctgacagcagggctggccgctaacgtcactgtcctggcttctaacgctggtagtaaccaacagagtttagttttgctttgacaactcctcctacagccaaaactattgttatggcccacatgtcattcctatttaccctaaataaggaaaaacaaaggctattctgggctcccggcagtgcttgtggtgggggttatttgcagcgttaccatggcaggctgccctttccaccacggccaccccgtgattttctctgaaaactgcgacagactcgcagcctgccctgaattttcttcacacagcctgggggcatccgaatgcacgggagatgttttacactcagatgaaacaaactgtttagacctcggggaaaagagactgtgcttgaacaaaatgaaccaggagaaagcgccctcctgagacatgtctctgctttcatgtttgaattgcctgggattctgttctctaatttctgatccttataaactaaaactgcctaggaacattgagcatcctgactttgaaggagtctctgtggtgtttttgtgctaccatacatggggaataatgatgtgaggcagagggagagggaatgaatgggagagccaagagggaagagcgagccggggggaaaggagcgcgcagtgtttcctgctgcggttaggacctcacgccttgccagtacagagctcggtggcaagagccgctgggagctgctcccatcagttagaggatgtggagagggagcaccagaagaggacagcccgcagcctggctcgcagcctgagggacgctgtgggtgctcccagccgggcgagcacgctctgggagcggatctgcaggggagaagcacgcgagcctaacgtgagcgtcccgcctgtcgcgtgtcctgccttggtaagcgccctctccggtccttccacactgaaagcttccagcagagatcaagggaaggagtattgtgtgagacttgcagatttcctcctttctgtctggactggtttgatatttgcctgttgaaaagattactgaacgcagtgtgacaagatgagccgtctagctgcgttctgcttgcctgtgtgtgtgacacgtccaggtgtgaggccaaacctgagaagtgcagactgctcactgatagacgttgctgtaaacagtagtgccctgggtgtacagctggtctcaggatcggagaccccggacttattctctgctcggtgacacggccggcttcctgccgcagagctcctggtttctgttgatggcagttgataattggtagccacagtctgcggtcggagccacagcatttgagtctagcacctggggtgggccctgctgatacagtagagagagagtgaacgaggcagacagaaacacaccccccccccctccacgctcacacactctcccacaccccatgccagctataactgcagctctgagctgcctggagaggagattgccggaagctgaagggatgctttgaacgtgggggggctgcgtcacagttggactcccacttgcagaggacctgattatgtccagtgaccacctgaacaacagcacactgaaggaggctcagttcaaagacctgttcttaaaaaaaggtacatttcccaagaactgctatggatgatgcatgctctttcgggtttgctgtggttcttcttggagtttggtctgaggacagagctgagaagaggagaagctctttctcaagaagtttctttctacctaagaggggtctgtcaactcagaacatttccgggtgggactccctttaggaagatgcatgtcaggctttttcatcttctttcaagcctggaattagtttgttcctgttggaggtgttatgcatgagtacacagtttgttgctttggagttttgtttttttcaaatgtctgtatataaggctgagacctcccctggaaattctgctacttgttaataattcctttttcttcaccctcatgagctgaaaactgcattttaaagaaaaggtatttctcaggatgtggctggttcattgaacactttcttaggtcatccatgtagtgacaggagctattaggaaggagaactgtgactctgagagatagagagccaaagaaagtgagagacagacagactggctgtgggatgagagcctcagaagccaccactctcccctgtggaaatgaaggttccattccatgtgcagctgtgttttttttctgatgcactttcctaaattaataatgtggaggtggaggtgagggtggattttaaatgaatcctatagggggaattatggcttatgtatgtatttttttccatttatagcatggcagagggatagacttttaaaaggtttataattgctcttactcctctgctgattttttagaaaatcctgtcagtcatctttgatcagaacatatttaggtaaatttctttctgaagagatcatgaaactctagattctaaaatgcgtggtgagaagtaattgtagtggatgaaggcttgggctttcataaagtgaggagatgccactccagctggacgggctcgtggagtctgcattcgagggattccctagtccgtccagtcatcacgggctgctgcccgcctgcccgtgccgtccaaggcacctggccttgggccggtatcaggtagccgcgcctgggtcacacctgccctccacgttcatctctccacctacagatcatagggaccgtttcctcattttattgtcatgcaaatgttgtacataaatacatggctataaacaggcagctcagagtaaccaggaggctcttttctcagtgacagatcacaccctcttagagtagtaatttttgaataattgttgcaaaatatgaaaacctttagcaaaactccagcaccactgaagtcatcaggaagtgtttgggagaatacgtgtctgtgctggatgctgttgaagcaggtcaggccgttggggtcccttcgttcttagggcttctccaccagcttctaaatggggaatgccaactttgtgccaggcacacactacctgctgagacactgtggatgaacaaggcgttgacccagggctcactctgtagaggaagaagaccagagaatggataccaccaagacagtgataagtgctgcaacagggttcagagctgcacaggaagtccccaaaggtagtgaacccatcatcggggcttaggaaagagcttttaaaggaagataaagccagcaggtgacgccaaaaactgggtatttctgtagggtagcttttttccctttcgttctacttgttgtactatacagtagagtagccaacccacctccaaggaaaataaaattcaaaatatataatgtaatcagtatgatgatagctcttattgttttgcttctgtacttcaagctgtgaagtcattcttgtaacacaggctgaattttccccctcaaccatggtgtttaatgagtgtgaatcttcattcaaccattaaaatctccaagagtatttttatactaacagttcacaaacttgaggcaattatagtctaagtagattccaactcctgcccccacccgtcttcctgccaccaccgccgcccggtctctggaggatcttggaaagaatttaccagcctttaggaacattcagcactttaaaagtgtcacagagccataaataaagagtaagacacccctaagactgtcatctcatcaccacacccgtctctgctgaggaggacagagacaggaaggaaatgcgacaagttcactgtgcagtagccaagcaggcccagccaacatgtgggagggtgggtgtctgtcccagcggtggggcaggaggcgtgcaggggaaggggctgcctggaggtaaggctctgcggtcagccagccctgggtttggtgctccaggaaaggccagcacgtaggggagtgaggtggggtgctgctgttggtagggtaggaagtgacctcgcagggtggggccagggcttcgtggccagtgggcggccatttctgtgacattgcaatgttctgcgtggatcgttttctggattcctgccaaggtgtttacttggcctggggaaagagaggaacgcatgaggggcccagaccttgccccctgacccatgatagggtctttgagggcatacataacacatctggagcttaaaaagaattaaactgtagaaataagacttcagtgaaggataatatattagtggaggaaagaccaaatggaagatggtgttaaccatcccacaaatagaaatgagtgttatattaggagcctaaggtgggacaaccacacttccccagagctctttaaaaatagcgcagacactcatgcctctagtatgattcagttcagctcctcattgaaccagggaagagaccgacagacttcacaccacttcttctgttcctgtaattctccactgtgcagcttgggatttcctggagatgtttccataaaaatagagagatgccatcatcactgtcgtcactgtcactgctgtacaataataaaagaaggtgctaggatgccttcctgtaagttttagactagatgtattaaaaagtatccggtatttccattgcagtgactcatctgttacagcatcatgaactacagcgccgtagaagggggatgtgaacgtttgactttggcctcaacttctttccttgcgtgccctgctttctagcactcttctgtggacatctgttactgttgaacaaggaaactcaaccagtggtctgtgttcagaatccgtgttaggcgtgtagcatcttggaagccccaaagcatcctattaattttctaagaatgctactattcctgcgggttttatttttctaaactttctgttttaacagttcttccagaattcattttcttcttagcctcccctttccagcccactcctccccaacccctaaaaacgaaacccaaaccccaggtgtctttcctttctgtggatgctgggctccacgcaccacagccacctccctgccctgccacgtgaaaacaggctgtgggtgtttagtggaattctcctgtttaaaatgactgagagggtgtgggaggacaggtgggggggggggggttgccacacaccccctcgtgagcttgaaagggggtcatggagggagagggcatctcaatgcagggctcagggtctgggaatcctcacacacgtttccaagaacctgttgactgcagttttcactttgaggatctcctgggccctgcctggggaggctttgtggccctgaagagagtacaatgctcatcttttctgttgctagtgttctggctcctgtgacttaaagacgagaaggaggtctgtttccactgatgggttttgcccagagtccccagagcaaggctctgccgcgtgtgtgggccccgcaccagaccctgacgccctcaggggagggcttcgggagcacccaccggccaccgtcacctgcagccagggaccaagctgctgcagtgagatgaccaggctgtgaggatggtggtctctgggacccaggtatccctgggtctttgttgcctgcaggaagagctgcctcctgtgcccagggctgagtgccttcatggctcaggcctcatcaggctgccgccaccccagggcaccccacggggccactcgattcggtttgcaggctcctgaggacagtgttcctgctcccacagcctctgagcatgcccatgaacttgacctgccccaggcaccatgccactagggtgcccgtgaacccccagggccgacgctcatccatgtgctgtagatgcacctgccacggctgggcatgactcatatttggagcctcagggcaacagcatggtgcaggtgtcccagcagggcagggcggtacctgtgtgtggcaggtttataagaaagcagtccccttaaaaagaaagatggtggggcctttactttttttttttttttaagagacagggtctcgctatattgcccaggctgatcttgaactcctggtcttaaacaattcccccgtcttggtctcccaaagtgctgagattccaggcacgcctggcctggagtttagttttacagagagtaattccatgcactgtttcatacaactgagatctttcttatccttgcctgaattttaaaatcagatatattagctcagaagatgcacacctttcagtcaatatcacatgttccatgtgctgtgtcagaccaaaagaggaataaaatccagagcaaataaagatctaacataaaattcaaactccaaaaatcttaggaaaaaaatatgtttagaatattaaagaggaccttcccaatcaaacaggatgtttagaggccataaaggaaaaagagagtatttgatggcataaaagtttatagcatctatagagaaactcatggtgaagtttcaagaaatgactggctaggggaaatagttgcaacatgtaacagacaaagatgtgtaaccataatatgtaaagatttcatataaatacataagaaataaatgagaaaactataaatacaccaatatgattatgaaaaagagaaacacaaattaccataaccatagggaaagatctgaaattaccagtaattggagaaatacaaattaaaatgagatacatatttttgccatcagattgtcaccagttaaaagggcgagtctccagggtgaatgagggcatggggaacatgccttcttcctgggacagcctaaacgaatgcagcctttacaaaaggcaggttctcagtagccatgaggatgaaaagtgattatgccctgggtccagaaatgtcacttttaggagtctttcctacaagtatactgacaaacgtgtgccagccacacacttgcacatatacacatgcaattttgtggtcataagagaaaaaagaaaaaaagcaagccacctgaacagccaccagctggagaaggcaaatgccagtatgtttgtactctgtaacagacaggccagtgcacgtgtgttcttgtttaaagaggtctgtgatgtattaagtgaaaagacacaaacaagatatttgcacatcgattccaataactgaaaaaaggaaaggctttattttgtagcaaacacacacacatgcaacggaggcctgggctttcccccgggacggagtggggcttggtggagtcaggggcgctgtgggttgggatgggagactttacactgcactgtttccttctatatgatttaaattttcaagaagttttcattatttttataataaaaatccttttcaaatgaaacacaaatatgtaaaaaatgcccagagacttgtgaaaacataatttgatttgctttgctgcaaatgcttgtctgcatagctttccatagtcaagaacagatgacctagaaaggtgtcctccaagggaagagttgattcattgcaggactttgtgctgatccttccctgtcaccatgattttcctctatatccatgtccataaagcagtgaagttctcttgtaaagaaaacatttggaaatcctagggcatgctttaatttgtgaatactccgctatttaaccacaaaataaaaacaagcattggtaaaagaaggcattattcaggtcacaatagaaatgtgaccttatttctgctcacaggccatgggaagtatgacatgcttgtttacctaggaacacagtcttcgacttcggggttcagccctcaccactgtgttcactgcctttgtcctgagcggagtctctctgcttcctttcatgcttatccctgggctggtggctgacccctgcacagaccctcagggctgctggaggcgcactcgggcactctgcagccagtgcagccttatcctgttggcagtggctgtcctcacagagaacacacccatgcagctgggcagagcccaccggggccacacatcccagccccttctctcagcctgggggtgctgagtcgctcatcaattcaccttgtaccagttaagccacttagctgcctcccgtgtcaagaggggcaaagtaggggctccggactcagcctgggagacgtcacatggtgtgtgggggtagggtcctgagaaacacagggtcaaggccagagtgtcccagacacaggaaggttatgtgcaggggcagagtcgaagactgtgttcctaggtaaacaagcgtgtcatacttcccatggcctgtgagcagaaataaggccacttttctattggaacccaattgcaaagggcccaagcccctgctcgaagactcagagcaatttcagtcttttccaggaagcccccaacatgaaaattgttgataagccctggggagcgtttttgtgtgtgtgtgggtgggggggtggggccgggggggggcgggggtggcacatataagtgtggcagctccaatggacatttcctccccataggaagtagacactcaaaccccaaggctgggccgggcaccaggcccctagagtccctgccacttagcggacaggccacggggaacccaagagcaacagcacccccttggctggggcggggccggcaggcctcactgactgccagcttcgggagctgctcagggcatggcctctgagcctctgagcatggctttgtccgtgtccacagggaacagtgatgttcccaccagcctggcctctccctgcctgcgggggcagggggcccttggcaggtccacctgctctctgcacagctcagccaccagcctcctacacagtctgctcttcattctcaagacaccagcgcctctcctataggccccagtgtcccactgccctccactcccaccctcagtccctagggtgtgggggtctgagggtggaagtggagggccgtgctgaagggtaggacatgtggggatccagagaacccctcgtccagcctcaccctcggttcccagggtgtgggcagcagacgcacacagtcgtagccactggggaggcaccacctgatctctgcctgcatcgccccacgtatgagcggatacacttgacagatatgcctccccactggccggggcctgagccctgctgcggcacatgtacgtgcatgcatgtgtgtgcatgtgtgctgtgagcccagggcagcacagttgatggcttctctcttcttactcctgcctcccccagattcctgcactgtcttcctcttagcatccccgagccccttgctctgaatttacatcactgcacggtcagtcacttccttccagcacgggggacaaggagtgaagcaggcagcagagccatgggctggaagaggggagcagaaagtggctccaggccgcccgtgagccctcgacctgcttcctctcccaaaacgggggtctggctcacctgcttccagctgccggcccaatgtgctgtgactggaagtcactctgtgttgctggactcacatgtgaagtgtgtgtcaatggcatttaaggaatctttggggtggtggtgtcagaaacccaggggagacctgaccactcctaaagtgctgtgcctgaaggcctggaaacaatgtggatgtttcctaactcacctgcagagccacagccttggaggcaaggggctgaagttgatttttcctttcaagtatgggtccctaggggaattgctttgagaaactccactcaaccataaagacgggtttaacttttctagagcggtgacattggagaaatagcttcagtttgtggagacgttctcagctccctgtggtgggggatggcagaggcttcccgctccccgcagctggtttgcacagcctcccgactgtgccgtggtgtctccttccctaaagtgggacagtcgtttctgtgtcctgctggcctctgaggaacagacgtgtgtgagaggccttcagggcctgatggctggggtggtgacagtgcctggagaatgggtggggactggaggggccaggtggctaaccactctcctcttccatggcagcggagctggagttcgcccaaatcatcatcatcgtcgtggtggtcacggtgatggtggtggtcatcgtctgcctgctgaaccactacaaagtctccacgcggtccttcatcaaccgcccgaaccagagccggaggcgggaggacgggctgccgcaggtgagtaccctggccgccccggctccagagtcaggcagctgcaagaggcttaggagcccatcagggttcagaggccgggagtgctttcagttgacatgtaacaaacggggcgaagcgcacctcgtaagtgttccacttagtgagtccccacaaactgaacacaccagtgtgaccagcacccagtgaacatacagacacagcagtccccccagaagcctgcgtgacccctcccaggtctcccctggatctttgctgcccgacgtggctttgccagcttctgagctgtgcacgaacgggaccggccctgggtggtccctcgtgcctggctcctctggcttggcagtgcacttgtgagattcattgtgttgtaaaatcctgtcctgagctgggtcctggaggtgctgcggggacaaatcacgcgctcatcgtcactaaacgtgccggcagcacatgggtgccatgagctggaggacgcctggagcttaaggcctcgggagcttcctggggatcggcggtggggttgttggcggtgggcttgtcagcggtgggcttgtcggcggtagggttgtcggcggtgggttgtggagggtggggttgtggagggtggggttgtcggcggtggaccctcaagccaaactgcactatgatcaaacttgagagaccaggggctgctgtcccaagcctgttttacaggctgtggttttgatggcttccagccagagggttaggagcggtgagttcagcgagcgtataaatccttggcttccgtgatgggcagcgaggccgagtctccacagtgtggagccctgcggtatgctgagcacaggagccggtccttacggagcatccctcttcaggaacagggctgtgcagttccggctcccaccctgacttacagagcctgtccagggtatggggtgcagctgtccaggtgggtttcctggggtggccgctggccctgggacccctctcaggagtgcaggctcacacttcactaggatcattggtgcagccatccatatgggcagagctgaggtttgctgtctgctctgcagctcctgcaggtagtggggagaaggaaggggtgggtgctaccgagtgctatcttcagaccatggtgagggctagacggggcagcctcggggaggagatgggatgccaggggaagacgtgcacccttgacagccgtttcctcctcttgccccctgcatcctctcttgccccttctgtcctctctctggatgcccagttcagtccacaagcccctctggccctgttgtgttactttcctcgagcctccacagcatcctggggtcctttgtctggtgtccacagagctgcgccatccagacgcactgaacactttggcatcctgatgcctgtagattgttggacagagggaggactaattcttctgaagttctaaacacacagtgtatgggattcacctgtgttttgagagaggacagggagaaaatctcatcacagcagcagtttcagaaccgcagaaggctcagacatcgctgctttgccttaatgtattacgggctgtgaacgccacccctggacttggtggaaacaagcacagccttccttggccttctctccaggagctccagaacgcttggggtctctgtgcgcaggcacacagggagttttctgtcccctgcctgggcgctccccagtcttcctcccagacttgccctggtgttggcttctctctccctagtgtgggtcaggcagctccttgctctgttcctggtgcagacccagccccgcttgctgtccctgttcatagcaccttgtgtcctgaacaccagcacactggccacacccttaccaaccaagaggcccagcagaaaagcaaaaagtgtcaaaaaagtgtcttctgtgtcatgtggcggcagatttgtgtgatgccctttcccgggaagcgctggctgccccacctgcagagcctcccttccctgaaatcaggaaggtgacagagcgatgttcagaggtcccttcagggctgcacactgcgtggcaggtgaagacattcggcagccagtgaattgtgtccacacagtggtccacatccctgtctgggcctcgttttgttaatgtgcacatacagtgttccccctgagagctccgttctggagctgagctggggcttgcagagatccggctgcaccgagctatttctcctttttttctgagtaacctggaactgggagctgtccctcctcgaggtgtggctgttcctcctacggcttcagcgtagcttagcaaaggactctgtgtgatgtttcataaaacacaagatgcattccagcacgatgaccagaggcagctcggcccaggcccttgctccacttcccgatctggtgtattagcccagttgatggttccccaaaagagaaaagagtggcagctgatgaggaagaaacctccattctctcctggacacagactcaggccttgctaatactatgggtgtggccatgctatccatttccctctctctgccctgagggtcccctaacccaggtcctctccacccaggaatgcccccacgcagccaggcttcctgcctcctaattccctacttctaacttcttttaagaaatgcctgttccccgtatacagtattaggggagcgatctgattcatttacactcagctcaggagtctcgatcagggctgattctgccaaatgtctaggggacatttgcagtgtctggcatcataagggggaatcctacaatgtgtcctacagtacgcgggcggccctgcaacaaagactcatctgtacagtgcgtcctacagtgcacaggcagtcccgcaacaaagactcatctgagtggatgtgagcggtgctgaggcggaggagccggccccaccaggtgctgagcactgccggacccaccaggtgctgagcactgccggacccaggggcacttcactgtaaaagaggctgcctgttaccatgagggggtctctctaggctggctctgaggcatccacagagcggagagctcttcccagcagtacgagtttggggtctggtctgggactctgccttgggaacagtttccccagtgactcctgcctcctctgctcatccagccattcagtggacactccgcaggagccaggcactgagtaggagggggaaacagtggccatgccccgcctccgccaccagcagcacctgcagtcccctggcggaggccaagaccccgctgccattctctccatcttcctaggggaggctaggggtctggctggccgattgtgcctttgggatgggggagtgtcaggcgtgggagctgtaggaggtgtttggggcaggtatgaggacctgtgtctcctccgtccccatgcctggcctggcccatgtgcagttggcgagggcagttccaagttccccgccttccccatccctaggtgaccacctgtgtcaggaagccccctcccaaggggcttggaaggggctgggaaggcacggctggctggtcagcatggcagggagggccctgtgccccctggcagagcctggcagtcctctgtctcctgggctccctgtgctgctgtgcaggcctgtgctccagggcaaggcggctggggaggatgagtgtgtctgggcagatgctgccatcctcatggcttctttccagttatcagggcccctgcaagcccctaagcacctcttcctttctcagcaccaatgtccgaggcctttctcctgcagcacccgaggccctgggagtccaggccctggcggcggctcagcaccctccagtcagcagctggggttggatgctcctcctgtcccctctgtggagcgcagcctcattaggagcctgtgcattgttggggagcctcctgtgagggcctgtttgtagagacccaccccagggctccatgagcacattagaaaatgatgttctatttaaacctggtgtgagaagtgctgggcattgaattaaccaacttctaggtgattaggcttcacactctgattaaacttactgttacgtctttctgctggaagcctggagagtggaggtggaaacatagcttggggcaataggatgggagtgagttttggtttggaggaggaggatgagcaggccagcagccttacttggctgaggaagcttcccgccctgctatgagcggcccctcgcctcctctacaggttttccactttgaccacaaggaagggccagaccaagcttaaccagacagcatcactgtggccctggcttctctgcttcttgcggagagtcccgttctgagaagtggtgactgccccgctgccttctctggccccttcctgagggagtgcccagctcagccagttctggtccctgtcccatagggtgtgctcctgtgcaggtgcaggtgaggagccgcagccggcgccctcctccccccgccagaggcctcctccccctgccagcaccctcctccccccaccagagccctcctccccctgccaccaccctcctccccccgccagcaccctcctcccctcagccggcgccctcctccccccgccagagccctcctccccccaccagagccctcctccctccaccagcaacctcctcccctctaccagcatcctcctgacactggcaccttcctcccatgtcccttggcctgggacagtgcatgctgcatgaacgtgatgggtgtcccaaagccagtcaacctttgtcgccatgcggtagacactgtgtgtcccaggggggcccaaggaatggatgttactgggcctgaatgtggtggaagtagtgatttctggatgaaaatgaaaactagcaactcaggtgtgaattacatcacagacaaagcaaatgcttacatcatagcagatagcagcggcgggtccggatctgcatccttgtgcattcttgctgaggtagcctgagcttggtttctttggagcctggtttgtgtgacttctgagcattgagactgtctagatttcttttcattatcttagaccattcagtaatgggaaagcagtaaaggggcatgaatattctagacacagcccggagagctatttgaacaagttgctggaacatttcttgctggagctgagggagcccaggtgaccttttctgactgccagcagcctggcccagagggtccagcctggcctgtgtggacagcccaggggtaggggatggcatgcaggcagaagggtctggccatcagcggatggagggagaggcaggagagggacagggacctttacccagattgaagcatatgaaattgttaacattcagccattttgacctatagaaacagcaatttcaatttaaaaaattaacaaaaggaatcacatcacacatctcttcattatcaactcctacagggattaaatcgattgtgaaaatccaggtgcccattcttcatagccaggaggagcagccaggccccacccagcacagctgggctcctccagctccctggggttgacactgggaggggccctggctgttgcggaggaggacaagcacttggtggctgtcagccctcttgatgcagaaactcatgctcctcagatccacagtgccctgacatggggtgagctctccccacaagtccctctctgcagaagccacagagttagcctagagcatggctgtgtacctggtttgccccacagggtgttcgaacctaagttgatctagcttttaaaaattggggctgggtgcggtggctcacgcctataatctcagcactttgggaggccgaggtgggcagatcacttgaggtcaggagtttgagaccagcccagccaacatggtgaaaccttgtctctactcaaaaatacaaaagttagccaggtgtggtggcacgtgcctgtaatcccagctacttgggaggctgaagcaagagaatctggaggcagaggttgcagtgagctgagatcacgccattgcactccagcctggccgacagagggagacgccatctcaaaaataaaaaaataaaaaataaaaattgtgagatttcacatgaaaattggagtttccatcttctcttgaaaaagcagcctatggggccacaccctgaggctggggctgtgaggtggctgccatggagtgggcctgtgctgcccgggctgtcacctgtctctcgctggggacccttcagtgccgggcagcagcattgccatctgtgggtttgcacgtgggggttgtttttcagagaaaattttcttctgcactcaggcttctattgcaaggctgaagaccaagatagactgagagggccactggttcccagaaaaatgggtgagaaggtccttgtggaagtaaatactgttcctgcctggttaggagttgagacacgtgtctgggtcaacagtgctgtgcgtgtcctgtgcccagcctgacatggtcactcgtggccactgctgtccagtcatctccccaggcaaggccctcctctgtgactaaagcttatagccagagggacagaggtggccatgggctccccgctctctgaggctcggccctgcaccagcagcctctctgctggccttgggagcagcggtggccagagggcagacggtcctgggcaggtgtctgacagccaggagcccgctgtgctggggctcagaactcacagtgaggggacctctgggtgtgccatatgtgacgagtgcctttctctacctgggcagtgtccctctaccctcccctgcagatagaggctctgaggtgggccccaggctcaggggtgtttgagaaacccacaggcagtgtcctgggatccctcggagggcacagggagcaggggtttcagcgccacactgttcattcccactgcggctggagcgctggctcgctgtgccctgctgctctcactcctgcccacctcatacgtttagaaaagcatgtggaaaacgatggaaaggaatgattttcagtaaggcttgaaggagtggactaaagggcttactgatgcagttgtactcggtctgcctctgacactccagactaaagaaaagagccacaggcttcctctggcatcattgtggggatgaaccgcaggggaccgtttccctgcaggcaaggcagaccctgctgcaccacagaccagatgtgtgtgtttgtcggttgtccagtgacagctctccgttactgcatttcacggaaactgcatttccaagagcttagggtccggcgggttggccgcagcatgtctgtctgagtgagcaaggacttccaattatcaggctgcccaggtggtcatttgaaaggttttgccctttgctatgtctaattgaagcattagaggatagacaatttcacatcacctcaaaatgagaacatctcccttcaattaagggaaacaggaggccaagcggcccggcagaaactgcataaggatgctggaccccagctgcacgcagattcccacctgaaccacagtgggcagagctttggaagagtcaatgcttatctttaaagtgacagtgtctcaaatagtccttctactgatgttggcactgctcagaatgtttgggaattaccttcaggttttggggttatttttaagtgacaagatctcactttgttgcgcaggctggagtatagtggcatgatcataactcactgcagcctcgaacatttaggctcaactgatccccctgcctcagcctcctgcgtagctgtgactataggcacgcgcaaccatgcctggctaatttttaaattttttgtagagacaagatctcactgtgttgcccaggctggtcttgaactccttgcctcaaacgatcttcccacttcagcctcccaaagtgctaggattacaggcctgagccactgcacctgactgggttgtttttatttgtttgtttgtttttttaatcaagggaaattttttaaaagcttctccacaatggcaaatcttcctttgcaaagagcaaatagttttgctcttggggatagatttgatttttggtaccagccaaaatccatttagagttaagtcttgttcattatatgggtgatcaaaccaaatgatacaattttggtgcaaaggcaagcacgactcaattagtgagactgacgtccgagttacaaactgatctgtagagaaaggtcaggaaggacccacagcaaactgacagctgtgcctgggaaggaagtaaggacaaaggaacactgatctgtgcagtaaaacttttatggtaagaatgtattcatgtattacctttgcaattacaaaacatcctctgatcatgtaaactgatgctaaaggcagtaatgttctgggcatctatagactcccagagtaattcatttgaacatggtttctatggtggctaaaataataattttaaataaaatgtatgaacatttttatcaacaaatttatagtaatcttttaaatatataaggtattagcattaataatctaatagtaaaatctgttggtttattttttgcttagtccttgaaagttggtgtggtttgttctgaaaaaaaaaaagagaagaagattaaaaattatcttaatgatcataactctgggtggcccctgttggggaggctcaccaggctggggtctggctcttggcaaagccccagcagctctgtgaccttgggtgaaggtcacagaaaatcccctctgagctctgacttcttctcacatgtgagacgaggcaactggtgctgaaatcaggatgatgcctgcctggatcttgtgtggttccacattttcctgctgcctggaactttctcattcccaggctgattcctcttgaagtccgattgctcactaaccccagcaccaagctgggagaggcacctcatattgcttttccccgctagcccattgcattgtcccagaaatagaaaggattcccttccttttcttccagcagaccttcctagatgatttgtcttttctcttaagggacgtgccctagattgagcagagttgggggatcttgaatctgagaagtctgatgatggattccccaggaggaagaaagggggaggtgcagtctctgacagccaggggtactggcctcacatccaggctgtgactgccatctagagtggaaaggacggtagtgataaaatatcaggatggtggagaggctgcatgaaaaaagggagaaaacagggaaaattgattttatcagaaggcaaaggtgttgctgaatatccaaagatcaatttcacctcttctttgaaattctcactgtggaacaggggaaaaatagatttccaactatttgaggccataaaatacattcattcactgggaggttagcccttgggtagaatcagaatacccagcagtagtcttgctttaccgcagactgaccgaggtgcctagagaggaatatgccctctgtcctcagtttccccccatctaaaatgagggataactggcttcattcggaggccttcaatctgtatcttgccatgaagaacagtaagaaatacattttatatcacaacacaaaagcctcctataatgcaattaaggcagaggttttacaaaacaatacttacagtgtgctcagatcatttctgttctgtttcagtttttggaatgctggctgtgacccacttaaatggattttccagctctctaagaggctgcaaagcacatggtggaaaacactgtgttcagtgctctccctggttgtttccagtccccacatctgatcattcctggggtcctctgtgtgtgtgtggaaaggagagtgtagctgagagcataagcccagcagggttcgggcgtggtgtggccttgcacacgtggacgcatggcagcaggcgacagcccatggtgcagcacaagggaaccctcagtaagtcatggctgcagacgactgtcctttaataatatgagatgtactggttggaagaaaaatgatccaataaatacagaaatgaaaaggattataaaatagtgctacgaacaattgtatgcaaaccaattggataacctagatgaaatgaaaagatattagaaacagcctaccaagactgaatcatgaagaaatagaaaatcttaatagatctatagctagtaaggagattgaaccaatggtctaaaatctccaacctggaccacatggcttcagtggtgaattctaccaaacatttaaagaattgacatcaatccttcttaaacttctagaaatttcaagaggtgggaacacttcctaactcattatgagatgaggccagcattcctgataccaaagccagacaaagacacagcagaaaaagataaccatagactaatatttcttataaatattgatgcaaaagtcctcaacaaaatactagcaaactaaattcagcagtatattaaaagggttatactggctgcgcacagtgactcacacctgtaatcccagcactttgggaggctaagggaggcagattacttgaggtcaggagttcgagaccagcctggccaacatggtgaaacctgtcactactaaaaatacgaaaattaaccaggcatgggggcacgcacctgcaatcccaactactcgggaggctgaggcaggagaatcacttgaccccgggaggcggaggttgcagtgacctgagatcgtgccactgtactccagcctggaagacagagcgagactctgtctcaaaaataataataatactaaataaaaattaaatttaaaaaagtaaaaggattatacatcatcaacaagtgggggatttattcccagaaggcaaggatggttccatacatgaaattcagtcagtgtcatacactacattaacagaatgaagttgggggtcccaaacttcattcagcaggtcccaagttcttgtcccacaatcatctcagttgatgcagaaatagtattgtcacaggatccttagggtgtcacttcgccagtcagaaacctttgtggctggtggtgccttctgcctgagtattgctcatgcccactgggctcatcctgcccacttcccctggcaggctgcgctcagctcacgttactggcccagatcccacacctgccaagggcaagccaggcacagaatggtgaggggtgtgtgagcaagtgagtgcaaggtccagccactgtgcacagccaggtgcgctggttgctgcagcagggcaggcagctccaggtactggcacaggtgcttgctctgtgcaaggctgcagctggaccagatacactgcatgcagcatccactgcaggcacttgcgtctggatgaggggaatgtgatggtacccggaagcttggagacaccaggaactgcagagtcccaaagatggtgtcacagccctggccaggagaaccctaggtctgggctgccctaagggtcacagctcttctttccttcttgtcccccacagtgtggtgagtggaggggcatgtttcagccctgtttatgttacagctcttttagtcccaccattcggccagtcacaagttcttgtcccacatccaagaagaatgaggtacatggacaactggtgggtgagaagttggagagaagcttcattgagcaacagaacagctctcaggagacccagactggatagctcctttctgtaggcaggtcatcctgatgtctgtctgtccagctcagatcagagaggagacccacagtgggtagctcctttccccagacaggtcatcccaatgtctgtctgtcaatgggtagctcctttctgtaggcaggtcatcctgacgtctgtccagctcagagcagagaggagacccatagagggtagctcctttccccagacaggtcatcccaatgtctgtctgtcaatgggtagctcctttcctcaggcaggtcatgccaataagtgtctagccgtcagtggagaggagacctgcagtgagtagctcctatccacaggcaggttgatccgatgtctgttcaagtcaaactgaatccaggatttttaatgagctcaaaagggaggaagtgcatgctgattggtccatggacggccacaggcaggcccagaaaaagcatcctaagttcttactctggtctgtggactccactcagaactgacagcttggcccccatgctttaggccattcctggcttgaaggtggggcttcagcagggacctgcccctttttgcccaggagcctgtctgcctcctgctgccatcagtcatgtacacggtgcccaggctgttggtgtcaaggggcacctgcaggcccacaccaacccaccctcagcccacccctgcctcagcctcccactgatgctcgtcagcacccaaagtccggagggggctgaggtggcagggggctggcatatcagcgctgccccaaattgtgacacacctggccaaattgtgacacacctggccaaattgtgacagtgcccaggctcagcctcagctttgctccaaaattggagcaggcagcaggagcggggagaagccaggtagcaggagcaggcacttctgagcctgcaggggcaggggacttcgctaggaccctgagagcacagggatgccctgggtccgcagctgcagctttgtgactgcagctgcacccaggagggcagggctcctgccctaccaactcagaagagggcagggctcccacctgttcctggctctcaccggctccgtggagcacacagccctggccatgcctcccctgctgcagccagcatcttcacagcagctgctccagatgggccaccactgccatcagtgtttgatgaaattcaacatactttcatgatagaaaccctcaacaaagtaggatggaaggaagctacttcaacatcataaaggctatctatgaaaagcccacagcttacatcatacttaatggtaaaagactgaaagcttttcctgtaagaccgggaacaagacaaggatgcctgctttcactacttctgttcaacatagtattaattagacattctagccagagcaattaggcaagaaaaagaaataaaagacattccaagtggaaaggaagaagtaaaagtatctgttagaagatgacatgaccttatgtgtaaaaactctaaagattctattttaaaaataacccaaaaagtgtcagaactaatgaatttggcaaagttagcaggatacagaatcaacatgcaaaaatcaattgcatttattttcatgtacaatgaacaattcggtaaggaaattaagaaaattccattttcaatagcatcaaaaaaagagaatacttagaaatatacttacccaaggaggtgaaagacttgtgcactgagcaatagaaagcattgctgaaagaaatggaagaaaatacaaataaatggaaagatatcttgtattcatgaattggaagacttaactatttttaagatgttagtactactaaaagcagtgtacagacttcagtgtaatcgcttttgaaatcccaatgaggctttttgcagaaataggaaaaataatccatcctaacgtttatatattatctcaagggaccctaaatatccacaataatctcaaaaaaaaaaaaaaagatttgaaaagttaaaggtctcacaattcctgatttcaagacttactacaaagctgtagtaagttttgtagtgtggtgctgggatatagacaaatatatagaccagtggaatagaacagagagtccagagataaaccctcaaatatatggtcaagtaattttcagaaaggatgccaaggccattcaatggggaaaggacagccttttcagagtggtgatgggggatctggatagccacatgcagaagagtgacattggacccttataacatattcaaaaattaactcaaatggacaaaaatataaacataagagctaaaactttgaaattcagccttagtttgactgctagaacaaagtaccgtagaccgggtggcttataaacagcaaacactgatttctcattctggaggtcagacatgagagaccacagtgccagcacggttgggttcggatgaggccactcttcccggtggcaaactgccaccttctcttgtggaaagagcttgctagcctccagcctcttcttataagggtactggtcccattcatgaggactccaccctcattacctaattacctagcaaagattccacctccaaataccataacattggagtatttcccatctccccccaaaaaagtgccaaatggtctgatgtaaaaggaaaaaaattcagtcactgtgctccagatctgcaaattgcacatcttgattttcagcaccataaagacaatcatttggaagatccggtgatattttttctctttaatgcaaatgttttggtgtcaagcagattgaatttgtggggagttttcctgttagtgtggctgttcactgaccattcagaaggaagaaaatgtgaaacagattgctcaagtgtaaaggagtctgaaaatgtctgtcctcaagcctgcaagatttggaaccgttctgcgtcccttttccatagatataggaataataagtctggattcagtagagtcatttgaccagccagcccctcagggtggtccctgggtctgggcagccatgctctccggagctgcccttgggggcaacttccagggccaagccagagaggccagagctctagactaacgttagagttccaagtgtacgcagcagagaagacagctatgctgtgtgtgtgtgtgtgtgtgtgtgtgtgtgtgtgtgtgattgtgccttctgtggatatcggctagggactgtctcaggaaagcctctgcctttggcgtgtttactgctgtcaaaaccctgcccacagccttatagaccccaaagaaaaatgttctcatcctactcagagatgttcaaacaggagtgattgtctgacagtgactacactcacaggagaatgacaaacagcaaggcccagctgtcccttggtaccctcaggggattggttctaggacctccaaataacaccacagtcccagcatgctcaagtcccgcagtctgtcctgctgaacccatggacaaaaaaggtcggcccctccgtatgagaggcttttccatctcatgaatacacattgggttgaaaaaaatctgcgttttagtggaacagccaggtttaaacacatgttgttcaacggtccactgtattcattcacaatacagatttcattttagaaaaaaaaaaaaagcccaaaggaaaataaagacttttcacaaagttgaatgttataaagttgtttttgtttttgtttttgtttttgttttgagatggaatcttgctctgtcgcccaggctggagtgcagcggcgcgatctctgctcactacaacctcggcctcccaggttcaaacaattctcctgcctcagcctcctgagtagctgggattgtaggcgtgcaccaccgtgcccagctaaattttttttgtatttttagtagagacggtttttcaccatgttggccaggctggtcttgaactcctgacctcaggtgatttgcctgccttggcctgccaaaatgctgggatcacaagcgtaaaccaccgcacccagcaatttttttttttttcgagatggagtctcgctcttgtcgcccaggctgaagtacagtggcatgacctcggctcactgcaacccctgcctcctgggtttaagtgattctcctgcctcagcctcccaagtagctgggattacaggcacccaccactacacccgactaatttttgtattttcaatagagtcagagtttcaccatgttggccagactggtcttgaactcctgacctcaggtgatccactcaccttggccttgcaaagttctgggattacaggcatgagccaccgtgcctggcctaaagttttttttgttttgtttttgttgttgttgttgttttttaccccatccactgcctccctatgtgacctcatgacatcaagaaaacagtgcatggtgcagataatctctgctgaggtttgtagtcatggtgactgcctcggtgggaagctgactgccatgctgggctaatgttttaatagcgcagatagtctttatgcagtggcgggccattggtctgtgtagcacctggggttcttctgaaaccaagtagccagagccagagaagaacttgcctgtaaggagactcttggttaatgcagcgcccaaccttaagagaaagctcctgaagaaatctggaattaacacaacattgcttaagctgcccccattcctcagcctttccattcaaaacaccacctttggaatactgtttaaaaaaataaggaaatgtcaatgaacttgttgtctttaaaggaatatcttaaaagagataatggaaattaggctgggcgtggtggctcaggcctgtaatcctagcactttgggaggccgaggcgggtggatcacttgaggtcaggagttcgagacaaacctggccaacatggtgaaaccccgtctctactaaaaatacaaaaattagccaggcatggtggcacatgcctgtagtcccagctactcaggaggctgaggcaggagaatcgcttgaacccgggaggcggaggttgcagtgagccaagatcatgccactgcactccagcctgggcaacagagcaagactccgtctcaacaacaaaaaaaaaaaaaaaaagagagagagaggtaatggaaatttatccccctttaactgtgcataacaacagcaagtaaccattacctgtgatgagaagagctacctgtttgctgaagcttatttaaggcactatgctaaggaattctcataaatggtatttgagcctcatgacaacctctttttacaaataagggaactgaggctgggagaaactaaatgagctgcctgagatcacagtttggaaagtggcagaagctgagctcggtggcacacacctgtagtcccagctatccgggaggctgaggtgggaggatgtgtttgaggccaggagttcaatgctatgagcacatttatgaaaatgtgctgctctccagcctgggcaacatagactttgtctcttaaaaaataataaatgaaaatgttttaaatttaaaaatgaaaagcatggccagaattctagcctatgcaatggctacctacctcagagacttcttacccttacagatgtatacctatgctgatagtggtagcctccatctgtataatattaaattgtcatcagataattcttgttaccttttttgttactgcctttgttccagggagaaaataagagaataaaaacatgcttgcaaggcagtgcacatacaagaggcctctgaaagctgctgccagacctgtgtgcccccagagcaggtgccctctcgtaagcatcctggggcaggtataacagcccctgataagtcctgctcagtgcgatgtgggtctcaaggaactggtccttataatggtcaaacatgagtgatttgagagtaacgtaacttaaaaagtaaactagaattcattcaaagtgatccctagagtaatgtccctctaacccactggcattccaggatgctttcttgagtttcttgggtttagagtgactccatgagccctgggaactgtgcagagcccctgtctcccagcccttggggacatgcagcaccagtatctgttggacatgtgcacatctgctcacatgttgcaatggaagaggactgagacccgctgcaaggaagtattccgtacatgtatagtgaggtcattaatgaacagctgggtgaatggctgcctcccttttggttgttattacaaggaaatagcctacaagacagggaatgcatttcagcctgtatgaagttattaacaaagttttgttcctattgcttaaaattctgtgaactactttaagtattatcttatttcacagcttattttgagtgatacaacaatgtaagcattagccaagaacatcagtgccttcattgttgattaaaattggccccataatgagtatgcgggaatgctgccatctgagcggcagccagctgtgtagtgagcccccttctccctgaaaatgttctccatagcatgtggggtgagtgaagagacccccaacctagacaagggagacacatctttgtactcagctatctgcactctctcagttggcacaagccccttggaggacaccagtcacagagtcacaccctcgtttgacagagatggagcaggagccagcaggcttcatcagcagcatgagaggtttaagggctaaggacggtgaccttgccaacaatcagcgtgtgacagccttggtggaatgaccagagaaggctgtggagcgagcatcagctaatggtacggggtggttgggattcagcctttctagaactccggtcagtcttcccatctgggttttctgggtagcagcctggggcacagagctggaatgccagccttctcgggttttggcctcaagctcttccaccacagcatgttgtagttataatgtccccatgtactgtgtgggtgaaaggcctgggaaaaaaagtttcctataaaagtaaataaattggggcagggggcaattgtcagtaaatagttaaataaattattatgtagtcataatttttgttatattattatacctcaataaagctggaaaaaactggtggtgatagaggaaagtgcttatgttatactctgtgaagaagagaatacacaactctggccacattatggttacaactgtataaatttaatatatgcaaatgaacaagcattagaaaagcacttaaagaaagaaactggcaaggtgcggtggctcacgcctgtaatcccagcactttgggaggccgaggcgggtgaatcacaaggtcaggagatcgagaggatcctggctaatatggtgaaaccgcgtctctactaacagtacaaaaaaaacaaaattagctgggtgtggtggcgggcgcctgtagtcccatctactcggtaggctgaggcgggagaatggcgtgaacccgggaggcggagcttgcagtgagccgagatcccgcccctgcactccagcctgggcaacagagcgagattccatctcaaaaaaaaaaaaaaaaaatgaaatccgttcaagtattaggatgatgggactgtagatgcatttcctcccattttagatttttaattttgctgttacattcctgcaaaaaacaaaagccaggcaggaaaagttcccatctccaggccatcccgtctggcagatgtcccaaggcaggaatggcctgaactcctctctaccagtggccaactctcctgctccaggcttggttctcaggctttgagaacctcagggcagaacacctttttccaccccagcaagcaaaatgaataggtaacaattgtgcccttgttttgagcaacaggagcagatgggacctacactggtgggctggcctgggaaaggtccagggctggcttggcccgggcagcaaggctgaggaaggtggtgtggcggggaggagaccccagggctgcaggcatgccctgcgttaccctctgcacccctttcctggcctcaggaactctctgtgggatgcgttagaagacctgccgacaggccggataaggccaatgagagagggaacggagaagaggggcacctgggttcacaggccttaagaaagaatttagttacttatttaacaaattaaacaatgtgtgtcacgcatgtaggtctgggaaatgcattattaaaaacacacagtgcagaggtgcagcaccagcatacgggtggatttgggactctaaaatggctttggttgtgtgtggtacaagggagaatgtatacatgtattacgtgtgtagttttttaaagtacacatatagaggaaaagatgagacaagtctgatgagatgtcaacagcaacaattcttagttgtgggtgctgtgaatttcccagagaggaggagagtcctttagctgggcatggtgatttcagcactttagcaggctgaggcaggatcacttgagcccaggagttcaagatcagcttgggcagcatagcgagatccccatctcaatagatggattagatggatggataggtaaatagagagagagagagatacagatatttagatagatagcctagattgcttgatgaatggataagttggataggcagagacaaatggatagagatagattagaaggatagatggatagattagatggatgaatgaatagagagaaacagattagacagagatagatggatccatcgattgattagataggttaagatagtccttgcattcaggcaagccacagcaggtgccgcctagggcagcggcctctgcccagacactcagtgctgcagaacaggagggaggccggggcctgtggcgggcgagggaaatgcggggcccgaggactggggtgagggagagaggcggcggcccagaggagcagcaggcgcgcctctggcggtttcctgtccgggctggcggggccgccagtcggcgtggggtgcggcaaggggagcggggcgctgggtcagccgagggccgggcctcgggggcgcagccggactggacggcggctcctgtgggcacttggccgggtttgctggtttttcgggaaataaggccactggggacagtcactacgttttcaggaaccgctcagcccctctgagtgccccgcagatggacctggcggcgttcctggctacggctgactgggctcccggagcgaggagcgcccctgcgggcccagcctgggccctgggcggtgggagggcctccgcccccttcccgcttccgccccgctggcgccggacccccgccctcgtctgtgcctgccaggccgggcccttccctcccgtcacaggcggtccctgagcccacccttcgtctccgagcagctggaccgccgtatacgtttgccactgattccaggatgtccccgagtatcttaggaaagggccgtgttggacaaacgcggggctcggtgtttcttccgcgccgtccctcgctgctggcgccggggccgtcggaggctcagtgatggcccagcccgcccgtttccgagaattccccaaacgcgggcccctacacgctgagttcgcgctctcccgtgacggccgacagccccgcggaccctgctgacagccacactctgggctgaaaagggtaccacgcgtactttttttcccagcacgcgtggggccttggaaagaacctttactgaggcctgtggctggcctgtcaccttgtcaatctggccaaacgtttttgaaaaaggatgctaactcaccagatgtgaagttgcatctgccctgtgaataggtggactggagaagacactcgctggaggatcctgagcccaggctcggaaagggccgtccacctgcgagcgcggacttgcgcctctgctggaggccgggcagggcacgggcgggccccgggccacctctgccagggcttcctcaacccagcctgccctcatcgggcggccactgaatgcggttggacagtcatcttgaatgtatttcaagcacacaggtgtagagagtgagccatattccacttcaaatctaatctggccaggagttcaacttttccatgtttccttttgttcacagccctccatgtagacaagaggtctgaaaagggacgggctctttctcgctccacgttttttgtttgtttgtttgtttgtttatctattttttgttttttttttttcttctgtttttttgatacggagtctcactctgtcgcccaggctggagtgcagtggcaagatctcggctcactgcaacctccgcgtcccaggtttaagcgattctcctgcctcaccctcccgagtagctgggattacaggcacccgccaccacgcccaactaatgtttgtatttttagtagagacggggtttcaccatgttggccaggctggtctcgaactcctgacctcgtgatccatccgcctctgcctcccaaagtgctgggattacaggcttgagccatggcgcccggcctcgctccacgttttatgcagatccccgtttccagaagttgtgcttcatgtttttaggtgcggcggggctaatgattttcctctgtttcttgttccccccactctcctccccttcccctccgccaggaagggtgcctgtggccttcagacagcgccgcaccgcggctgggcgcctcggaggtaaggggccccaggaggtgatggctgcggggggcggggggggtgggtggggatgaagggggcgtgtccctgccacgtggggtggaaggggaggggcctcaccacgtgggctgacacttttggaggaaggcattgcctagaactttggtcaaaagcgggaggggacttcccctagaatcttccagggattattcctgctagtctaaagctccttatcaaaaacaatttgagaatcacttatctttacatgatcccgtaagcttctactaatgtgccttggcaagtgggcatggtttataaatatcatagcatgattcattcccacatctccaagtgtaataatgtggattttaaaataacatgtttttgcctttaagttaaaaatattggtgtgagagaaatcaatatctgtatgtacgtgtgtagatatgtgtgtatattaaatgcatgtatatacacatatatgtatacacacatacacatctatgcatatatgcgtgtgtgtgtgtatgtacgtatataaaagagccgtctcctagaagaaactgggatggtagaacaaatgagaagattttgtaagaaatgtactacctggattcattttgaaaaaataaattattataatcatatttatttgagtaaaaaatatttttcatgtcagtgactaaaaataactacaggaaacttttattcagattccagataactggaaaagtctaggagccacaaagaaaaaacagtcattttggggggaatttgttaaaaagtaattggcaatgatcttctctaagtaattaataaatcgacccaatgctttgtatctgctccacgtaccactgtgtgaagttataacttctgcttactcagagttctggccggcgcagtagctcatgactgtaatcctagcactttaggaagctgaggtgggtgggtcacttaagctcaggagttcaagacaagcctatgcaacatgacaaaaccccatctcaaaaaaaaaaaaaaaaaaaaagctaggcatggtggtgtgcacctgtagtctcagctactcaggaggttgaggtgggagaatcacttgagcccagaaggttaaggttgcaataagccaagatggcgccactgcactccagcctaggtgacagagccagaccctgtctcaaaaaaaaaaaaaattaagataaaaaattaaataaaaataaaaactcggagcccctccttacttttctgaaccataggttctaagttctagagctggcagggacctgagaaagcaggcagccctgtcctgtcctcgtaagttatagagaagccgaggactggacgatgtcactggtgaccagatccaagtgcaggccgcagtgctcttcgccctgtgactcttggagttcctagtgtgttctgtttccaaggggaaaatgcacacgtagcacgcacagaaactcccaggagcccaagctttccattacccacagctctccattgctcagccctcctggatgcgctgggatttggcaaggtgagtggtctgtcataaggaatcagaaaagtacacttttttttctggaattggattttcctgttttctttttttttttcctgggagatggtgttcaaactggtaggaacacacaccaagcgtaactttccttgattctgacacatttatggtcatcattgcgctcaaactgtcttcaagcctctcctcttttccttccagatcatgcatgccccgcggtccagggacaggttcacagcgccgtccttcatccagagggatcgcttcagccgcttccagcccacctacccctatgtgcagcacgagattgatcttcctcccaccatctccctgtccgacggtgaagagccacctccttaccaggggccctgcaccctgcagctccgggaccctgaacagcagatggaactcaaccgagagtccgtgagggccccacccaaccgaaccatatttgacagtgatttaatagacattgctatgtatagcgggggtccatgcccacccagcagcaactcgggcatcagtgcaagcacctgcagcagtaacgggaggatggaggggccaccccccacatacagcgaggtgatgggccaccacccaggcgcctctttcctccatcaccagcgcagcaacgcacacaggggcagcagactgcagtttcagcagaacaatgcagagagcacaatagtacccatcaaaggcaaagataggaagcctgggaacctggtctgattccttccaacgtgcacttcagctggagaaagaaaccaagaagggaagcggccgctgggcccctcctgcgcacagtgttgttcagtttcacatggtacaaataagtaaaaccaaatgagcaaacacggtctttgtttctgattccttttaggggaattgcatgcaaactagactgaaatgatacaaacttccatctggtctgaccgcaaacagtgtttatttggggacaggggttgggatgggggtgtgggcaggggaaaacagagaacgggatgctttgaagataccatgaaataaaacccacagaggtatttgatgtatttaattgtgaaaggagactttgcagataaatgaggccagaatggcatgttttataattaactgaataaagaaggaagcattattatatattattgtggggaagaaccagccagttcgctttttctcctaaggtgtggaacttttattttgttttaaaaatatgaatcaaaattcctgtgttgtgtgccaaggtataaagtggagaagttagatgagtgcaaggagctcctttgtgttgtgatgatgtgttttaaaagttgcactatcttaatgttgaaaatatttacaagggaactgttttacgtgaagttctgtatgttgtcttttcacctgtggattgtaatcaggcccaaggaatatcctggagtggtccccagaagcatccaagaaaagatatttggggacgtagcctaacattttaccaacttacgtaaatcaaaaaagtcattattgttgcaggagtttgcatcaaatagcagtgcatcgctgaagcttttggagacttttggatggaagataagatagggaagattaagttccagcatttctgacttgttattttgagttactctgctactcttaggctgcatagtttatgagaaaatgaacacatgcatttatggatccagtatcatgcagtgctgccctcatcctccagcagtgcaatttcttcagtaatttagatttttttcactatagcatgaaatatattcaaatacataccttattttatgcaataaattgtttaaaatgcaaggtggttattctgcatactgttgaaatatgtgactcctcagtatattcccattgcctctccccctttcctcgacagcttagttcagttctgcagggctgctcagttcacaggaggctcccagcagccaccccacatccagcctacacagaacttcgtgtgggagtggtgtgggtggtggtttcttatgctttggaagcccctagaaataatgacggaagaatgccatgttgctgatcgtggtaataagccattgtgggttattgtatgtcactagtattagcatagcattcttaaaggaatgcagtgctcaaaacctacccaaattcccgcaggattctaccaaacccttccccaggccagcttttgtactgaaggcaagaactggacagtcagagaacagtggagggggcaagtgactgaagagcaccgggtaaaaagcacaacatgcagttaaaatgcaactagaaaactaattttaaatattgttagttttaatattcctgatatttacaaatattcattcttatatacaatgaaaaaaataactttcttctgcagatgtaagcactggcttttataagagcagcagccaacacgtttagcagacactgcgcgtggagaagggcttatctgcagtacactctgccatgtggagggtgggcctctgtggcctcttcacataacaagatgagctggaatgatgattccatgactcccacctatgcagccttaaagccaaatccgcgtgtgtgtgtttgtgtctgtctgtgggtctcgaaggtgatccgtcggtgcggtggctctgtgctgtaactggagagactgttccaaaccccaagagttgtctgatcctagtctgttcccttctgcttcttacctctgtagataggtcactggtttttgtttgtttgttttgaggattggaatttccattacattcatcctttgcacacagtaacatccacagaactagtccaactcttaaaaggagagaggaaaaacacaggcaccagttgtcagctcatgcttacaacctgtgtggaagtatatacagttgagagtcacagtggaggttctgagactggattcagtcttgttccagtgacagttggaaggcctctgctggagagacaccagctctcagggcagagattggcttggggccagaaggaccctccccaaccctggagacaccctgaaggttcactggctctccagattagcctctcttcctctgtcaggcaaagatgaggagcccgtgttcccatcgggccctgctggcagggacttgcagtggattcttggtcaggtgtgcccacagatgcggaggcgaggtgagtgattccatcatttcagttctcacctgcagttttggtgaagcaggagatgcaccccacagctctagctctcaaatggcttcacagtccttacttctctacctgcctcaagaaggggctcagagcagagacttgtgaattccttagtaactgtgagtatatgaatgtgttgcacatgtccacagtattggcgagataattacataattcagatacctttaatcatctttcaagaaagaggctcctcccattcaaccaccctagagaactgcctttgttaaatagttatttaaagactcatacatatcaaaccatgactttgaaaggtcttcgaggctggggctctgtaatgaattagtttaaaagccaaggtcataacatgaattgatggtcaatttcccttcagcagaaggaaaaggtgatttagatcagtagctcttttgaaggttgtggctgacctgttcataccgtgtcgcctcatggctagtgtggcgttgaaagagtagcgactgggaagatacaacttacacagtggggcctattgttctttcaagaaccctttttttagcttatagaacccatgggtccagtttagtaacgagtgatttaggcaatcaatgataggtttataatcttagattattccagcaaagtgtggattgcattgttaggaagaacatttggtgggaatgaacactcctgggcataccgctgacttttgtcccttgttcccggtgtaggagacccaaggcatcttgaatcccatctataagaacacaatcttccagcatacgtttgctttttcagaaactctagcattctctttaaatactgacgcaatccttaatggaaaagagatttcatgaagcaaattatgtatttcaatagttcttctatttttagtgtccaaaatttactaatacagaagcttgacaagcatgtcctcaccctccccaccacataaacacatggacacacacccaagccacaagaaatcccaagagagcagaagcgaatttttaaaagatttatcgtgaggactgcatttccattcactaattttggctcaaacttatgaggcaggaaataggggccaacagtaaatgggggaggcctcctgacaccagcagaggaattttgtacccaggcgaggacttcttgaacttctgcgtatctccgtttgatctctttcacctttatttcatcttcataagaatgagaaaggctcaaaaggaagcacttttagaaatcttctctgacctagaagaatccatccaaatccctgccttcctctctgaaccaacagttcccttctctgacaggggccatcctctatcttccatccagcggctcttctttttaggaaggctctggtgcagagcacttcaaatatgtcctcaggccagatactgattgctagtagagagacacccggcacccagtccgaagccctccctcaaaggaccggctcatggcgttggtcactggcaggctcagagacattctgctgtgggcgcagggagcccggccccccatgcagccatgactggatgcgcccccatctcgggggcttgctgcactgcttgtttattgaattttgctacttagaatggcaacattaactttgtgtaccattcattttttaaaaattttccaaagctcggcagtgtatgaaagaaaaaactgggaaagatacttggtttctgttaacttttgtgttgcttgcttaagtgattaaagccagtgcttggagccaagccttcatgccacgaacatgctccacagcctgccctttgctctcctgctcacactgaccaagaatgccgcgtgcttggcctactgaggtgaaaggacaattgaatgacaggtgggcaaagggagaacttccccttcttggtgcgaggaaagtcacaaatttaaaaatgttgcttccagcccagatcctaaatgctagttctcagcagctgcgtggcttaccgttcgccatttccaccaccgccagctgccagcaccgctacagatcacagagatgtgaacagacaatggaaagcactcttagccttgcagtggtctacattttttaggaaccaatatttcagcattctttattacccggcacgctgtgtcctttgcagagttcaagtttatgttactgccagggtcagacagtcatttgctgctgctgctgctgctgctgcttctcgaactggatgcattaggaagctgctgtctgagtgtaggaatgtcttgctaagaaagcaatgtcttccttcatccttttctttcttccctctgcgtgtccttgtttttgtgtaatgcgggagagggttagagctatagagattatatatacactatccgtgcacattatatatatgtagatatacccctatcatgtcagagatctgcatgtcagtttttcagcaactaaggtgcctcatgttctgagttcagcagatataggaaccaagccgccccctcctgcacttgatgctcccacctttgttgtgcctcacttaaaatggtgcttttttcagttgtctgtcttttcttatgtttttatttgtaaggtgctgtatataagttgaatatattatgcacatatcctacccaatgggtagaacaaaaagttgttaatactgtaatataatgtatagatgataccaattttaacagaaatggcatagaatttgtgaatgcctatgtgctttgtcctcttttgtaaggaaatttgcaaatggatgcatacagattaaagtctatgtagtttattttcctattaaatatcaatattataacacaagagaaagaagtgtgaacaaacaagcaacagtttatgaccagcgtatatatagcaatggaaagttgcatctttgctgtgaaaacactttaaagaaaatactttttaaaaaatcccacagctttttggttgccactagacgcttcttattttaatcattttagtaatgctcagctggaccagtgttagttatatttgagtcagaaaaatgttgtttttcaacttgctttataatctcctgcatctatctcctgctgtagcatcacgaaggtgtcaggcaacagtgaaaagtgcacatttttgttgttgcagaaactgtgtcagaggaataagtaaatcagcctgcagcagaagactttgttcagctccagaggcatctgtgaccgtctgtgtccaagtctctctgtgcctttttcttttacaaactgaagctgtggagccaatgaagtaacagtagagattgtagggaaagaatacctcaggaaaaacaaatacacttacaagaagaccctgttcttagaaaatgtgtttagttatgggttagcactagaagagacttggctgtcagccagccaagtgaaggacctctcatccattcccattcatgtcccatcataatacggacccaaaaagcaaactcggttttgccatcagttagaaattacgttttggattgtatattgttacatctctcttccggcttagtttttagtgtctgattgtgacctctgcatttatcttcaaataccctaattttaaaacaaaagaacaagaaaagtttataacaccatgttcactaaaaccacggttgaatcttgggtgtgggcatcctttcgagtgttgtccataagagcagttcgtggaattttgcccatctgacccatattatcagcttattctgccaccagagtagagtctaataaattccaaagtttttatttgctccatggtgtatgttctgactttgaaaatgtcagattctataatcatacccctaacatccaggaaacaaatgacagattatctttaaactgaaattgactctacaatgcaacccttaatgctgaatggattaaaaaagtcagcccttttagtatctgtttgaaagggccgtaaaaagttgacacttttgttgttgtggatcctgcgtgtctagacccacgtgttgtttccatcgtatactgtagggtgcaccccttgggattcatcattaagaactgaggctcactgttgtcagaaacaaagctcccaccccccaggttcaaccttgtgggagaactgttgagcatgagaatgttctagactcagaggtactaaaatttgttaccacatcattgcttcctttctacaggacgaattgaggcttaaactttactgttaatgatactggttcattttaatgtgcttgttggtatgttgctatttttcatttcatagctttcaaaaatcatgctaattgtatacttgtctagtttaaggctattttaaaatatgtacaatactattcacagcatttagttcgtttaatttttattataaagcaatctactaaaaaagtacaactgtatttgaacttttcaatagttgtttgtgagctatgataatcaaaagtcattaaagtcttttttaacaaacattcgtgcttacttttcaacataattcccagttatatacagaaaaagatttccacctgtcacgtatctgcctcttttacctgagcaatggtgtagttcttagacctaaggtctgtaattgcaatacttttaaagaaagatgttgctctaagtgctgtttgttagttatgaaatcagatttttctgcttgttcttaatgctgtggtcaaaccatagcacaaaatcattaaaaataatcagcggcatacatttgtcccttgggtttttgttttgtttttctttgtctttcagcaacaaggcacatgcatggggaaaatgctgtgtgttttaagacctgtctcaaagaaatacttcctgtggctccctagctaaacttcccactcagcttgtagtcactctgacttttcaaaaaaatcactacttcatattctactagaagcaattctggtcagatcatgattcgtttcccaatgctgggttctacacaggtcattcagacagtcatcaggtcccctcatgcaaggagtccccagagaaactgctcaccccacctgaggcgcccagggaggactttctagatgcctcaaaaagtctttgggtggctgtcacacaaaaccgaaatgctcagcccaaaatatgaacaagattcctaacaatgacaactattccacaatggaacagaccccctcagtgtgtgttttaaactccttggcattggaggtctccagtcagtgataatgtaacaacagagaggctctaaatttcctacaccgagagactagaatagtattatctctatgctctaaataagaatatgggttcacagatgatgactgtgtgtgcataaaaccccacacgatctaccaaactactaaagtggatttagcatggttgcaggatatgcaatttatttttgcatttctatgtacttataattagcaaatggaaactgaaattttgaaaataccattcaaaatggtatgggccccaaattctggtatgggccctaaattctaatggtacatccattttcgattctgaattaaattctttctttaagattattttggaaaggggatttgaagagagctataagaaggaatagagcaataggaaagtttctttcctgtcaaacagcaaatagtcactaattaaccacaccacactctggaataaattctgtaatctctgaatttagcaaaccattagagaaatattaaagataccccccaaatttgctaacgctaacaactatgcaaactttgttcctgcagacagctctgcacagaaggaatgaggggaatccaggcttgggatccctgcttatgcagaccataagcagcaaatccagtaaaacctgggactggcttctcacaacggagacacagggctcctctctcccccactgtccctgggaggctgtaccagctgtcactttagaagctgtctcagagccaaggatgtgggaactgttagcagaggaaacaggcaaatgagagaggagagagaaaatacaaaaggtatgctgagctggttcccactacgggccaaggggttcagccacactcgagaaaccatgcaggctgtgcctctgaaggacaggaggctgggacatctcatctgcccactgctgaggagtgcccttacaggttcatcttcccagccaccctggctgtggactgagcaagctcagaaggcttcagcaaaatacctgagacagaaaaacaaaggcttggaagtgcttggaa

SEQ ID NO: 315 - DNA, 155369 bp, Homo sapiens
  source 1..155369: mol_type = genomic DNA
cgtgtacggttcatgatgttcctagcagattctccaaactgactcactcagcccctggaacactaaaaactgcatttcccagactcctttgcagcgtgggctaggttccaccaagccagacacagtgaaagtgagtgggtggccacaggtggagggcacagtggtggatatgttttgttcttttgggggcagctatgctgggggctgcactaagtgatggggcagtggtcccaatggagtagtaaaattaagtgtttctcgtggctgcatggctcctggctgtgtaggacttagacccgtcatctgtaagctccttcacctcatgtaaacaaaacccctctagctggagtggtgtctattgtctgcgactaagaacccttatataaggtatactactccccaaccccattagtggaaatcccaaagggtaggaactgtattttatttcacttgtaaacagctcccctagtaagcatgtcaacaaaatatacacaattcattgaaccccataacatttcaacgaattcctcatcctttctgtgaatcaagagcctgaaaagaaatggtgaaataatatgatcctctcttctttgaaagctcaaagctatgttggaccagaagtaaagtgttctcgtttctatttaataacttgaaaggttccgaggggccattgaggaaactcctcccttttaatatcaatgtgtatttattgcaaaaataatgtagcatcgagtggtattttatagcttatccaaaaacctcctgggtttaacgcattgtgatagtcccgttttcttctcagcccaggtcctatgcatcctcatctatgcagggctgttatctgcatataattttttttttttttaagacaaagtcttgctctgtcgccccggctggagtgcagtggtgcaatctcggctcactgcaacctccgcctcccaggttcaagcggttcttccgcctcagcctaccgagtagctgggactacaggcatgcgccaccacacctaggtgatttttgtatttttagtagagacaggggtttcaccatgttgaccaggctggtctcgaactcctgatctcaagcgatccacccgcctcagcctcccaaagtgctgggattacaggcataagccactacgcccggcctcaattttgtattgtactttttctttctttctttaatagagacagggtctcactatgttgactaggttggtctagaactcctgggcacaagctgtccgcccgcttctgcctcccaaagtgctgggattgcaggcgtgaaccaccgcccctggctacaggtgccttcttgtctcaatttgcctttgacctttcttagggacttgttttctgcttttcctgctctttgtccgctgatctcctgggaagaaagcttccgaaaaggacaccgtttcaggggcgagtgacgccggggtgcccaggccgcgccccagttccgggtttgcacccggtcttcttgccctgccccgcccgcgggactacagttcccaggcgcccctgcgcggccgcggcgccggcgccggcgtcggttgggacgcggagctgaggagcagggccgggcgccatggcaccgtggggcaagcggctggctggcgtgcgcggggtgctgcttgacatctcgggcgtgctgtacgacagcggcgcgggcggcggcacggccatcgccggctcggtggaggcggtggccaggtgagtgggccccgggacgccgctggggccgccgagctctaagctcagcccgctccctggctgccggcagggggcggggcggcagggggcggggccgcggcgcaggccccgcctcggtctcccccttcccaccccggtgcgcgcacagtgctgaccacggacgaccccactgttgcccccggcgagcaccaggactctgctggttagggctgcgcggtcagacagggcggccacctggtacgtgcgctgctgagcgcttgacctgcggccagtctgaattgagatgtgctgtaagcgtaaaatgcataccgattaacaagacttagccgggcgcggtggctcgcatctgtgattctagcacttgcagaggcagaggagggaggatcgcttgaggctagggggttggagaccaccctgggcaacatagggagaccccgtctctgccaaaaatttaaaaattagccgggtgtggtggtgcacgcctgtaggcccagccacttgggaggctgaggcaggaggatcgcttgagcccaggaggtcaaggctacagtgagctgtgatcaccccactgtactctagcctggactgcagagcgagacggtctcataaacaaaacccccaaaaacaccagacttcgtgagtaaaatgtaaaataaaaacatgaaaatgggttatgttgtttgcctgttgaaatgatatactttttgtttgttttgttttgttcttttcagatggagtcttgctctgtcgcccaggctggagtgcaatggcacgatctcggctcactgcaacctccgcctcccgggtgcaagtgattctcccccttcaggctcccgagtagctgggattacaggcacccgccatcatgcccagttactttttttatttgttttgtttgagacggagttttgctcttgttgcccaggctggaatgcagtggtgcaatctctgctgactgcaaccgccgcctcccaggttcaagcgattctcctgcctcagcctcctgaatagctggaattacaggcatgtgccaccacacccggctaattttttgtatttttagtagagacggggtttcaccatgttgggcaggctggtctctaactcctgacctcaggtgatccacctgcctcggcctcccaaagtgctgggattataggcgtgagccacatgcccagttgataatatttttaatatactgttttaggttaaaatatttgaaattaagtataccttttttttttaacttttgttaatgtgcttattagaaaactttaaattacctttgtggctctcattataattctgttggactgcattggtttaggtgagaggaggaggaagagaacatcgtgccagccaagacttgaccatgaggacacttttttttttttgagacagttttgctcttgttgcccaggccggagtgcagtggcgccatctgggctcactgcaacctctgcctcccaggttcaagtgattctcctgcctcagcctcccaagtatctgggattacaggcacccgccaccacgcccagctaatttttgtatttttggtagacatggggtttcaccatactggctaggctggtctcgaactcctgacctcaactgatccacctgcctgggccttctaaagtgctgggattacaggcgtgagccaccgcacctggctgacacttttctttgtataatttttttttttgagacaaggtctcattatgttgccagggtggtcttgaactccttggctcaggcagtcctcctgccttggtctcccaaagtgctaggattacaggcatgagccaccacacctggcctaatttttttttctttttttttttttttttttgagacaaggtcttactttgccacccaggctggagtgcagtggttcaatctcactgcaacctctacctcaagggctcaagagatcctcccacctcagcctcccaagtagctggaactacaggcacgtgccaccatgcccagctaatttttttgtgttttttgtagagatggggttttgccatgttgcccaggccggtcttgaactcctgggctgaagtgatctgcctgcctcagctcccagagttctgggattagaggtgtgagccactgtggccagccagaaggacactttcagtagcatggttggcaccactggacctgggctttgtaaggcctcctgttggcatcccaggtcagcactgccatgtgttgataggcagccgggaagggctaactgccaggacttggcctcccggagtcactagctgaggcaccctggcttggtagcctgatgtcactgggactcaatatacctatctgtaggtggcaattaactgagtctcttggtccttcttagagaccccattctaccaatctgcatgtctgatgtctgggagctgctgagataatagggacccaaacggtcccgcatagtgaagccggaggtgtttgggaggctgggaactgggaacagggagacttggcttccaggagcaagcacaaagggcagcccagacctaggacactccgctgggtcctgggtctgctctcagtgttggctgaagttcagggttaagtgcattcctgaccttattctccattactccaaagctttagactagctcagtcacagatgagagcattctgtgagtggcactggtgggaatccagcagagggctctgggcagtgttttggggtgaagtgggcctcatctggggagcaggaagccagagctcaatgctgtgactggggcaggcaaggcctcatgggagaccctgccactcattgcttgcggaagatacatttgacattatctaccagtggttccacttctgagaatttgtccttgtctcatgcgtgagaaatgacatgagtacaaggtcattcctggcagtaccttttaaatagcaaaagactggaaacagctcagatacccatcagtaggggagtattagggtctgatgtgtggaggggagagggacagtaaagctgcaggcacacaggtaaatcatcctcacaggtgggcacacgggtaaagcgcatcatcacaggtaggcctaaggggtgtgaagacgggagggtactgagagtgtgatggacgagggtggcctgtgctagagagggggtcgggacagctctgaggagaaggcactggacagacccggagggataagagggaactgtctgcaggaagaggcggaggaagcgcattccaggcagaaggaatggtagctgcaaagacctcaggaagagagcacttggcgagttcgagggcgtggggtgggggagtgggtacaccaggcaggaacttgaggggcacggagaggtgtccggactttatcctgagtggcaggaagtcagtgaagactctagataggcatatcatgtggtctgatttatatgttttaaagaaatacaaatgtaaaaagtgagacatacaagtcaaatgaaagcaagggagatttcctttgaaaccttggagagaaggcctttacatccaggccttgaaatctagaaagcaaaaacaacgaacaagcagcccaatagcaatatgagcaaaagatgcaaacaggtcatggaagaggaagtgagagaggctccgccttactcaaataagaggtgtgtgatctcggctcactgcagcctctgcctcctgggttcaagccactcttgtgcctcagcctcctgagcagctgggactacaggcatatgccaccgtgcccagctaatttttggtatttttagtagaggcaggattttaccatgatggccaggctggtcccgaactcctggcttcaagtgattcacccaccttggcctcccaaggtgctgggatcacaggcgtgagccactgcgcccagcctgagaaatgcaaattaaaactatatcaagctgccctgtttcatcaatttgacaaaattggccaaaatccaaaagtttgagaacactttctctgtgagagtttgtggaaacagaccctgccacacattgcttgcagaagatacatttgacattatctaccagtggttgcgcttctgagaatttgtcctatctcgtgtgagaaaggacacaagtacaaggtcattcctggcaatgccttttaaatagcaaaagactggaagcagctcagatatccatcagtaggggagttttagggtctgtctgtttatacagcagaataacatgcagtgtaagaaggaatgagtaccttgtctatagacatattactagtggagacagcaagcacacagcaggatgcacggtgcgctgtttctggtatagaaaatgcagaaatgcaagaatgtatttctcctgctgtgtttgcataaagacactggaaggacgcaggctgcttcagagtctgggaagagctggaggataaggaaagtgggggccactgtgtggttggagacagggtaggagaaagactcttcactgtataactttgtataccaacgtttttgtttttgtttttgaaacagagtgttgctctgtcacccagattggagggcagtggtgcaattttggcttactgtaacctctgcctcctgggttcaagtgattatcctgcctcagcctcccgagtagctgagattacaggcacctgccaccatgcctggctaatttttgtatttttagtagagatggggttttgccacattggccaggctggtttcgaactcctgacctcatgtgatctgcccaccttggactcccaaagtgctgggattacaggtgtgagccaccgcgcccagcctgcatatcatttttaagatttttaaactatgtgaatgtgttttctattcaaaatattacaattcaaatattaaattgaatattaaaattcaaaatattaacgtctgggcacagtggctcatacctgtaatcccagcactttgggaggctggaggtagaaggattgagaccagcctgggcaacacagcgagacccccatctctacaaaaaatacaaaaattagccgggcatggtggtgcacgcctgtagtcccaactacttgggaggctgaggcaggagaactgcctgagcccaggagtttgaggctgccgtgagctatgaatgtgctactgcactccagcctgggtgacagagtgagactctaaaaaaaaaaaccattgttttttaaataaaatatttcaaggagatctctctggctgcagtgtggagaacaggctggcagtagggcaggaggtgggggggcttggactgggtagaaggcaatggagatggggaggaaggcatgaattaaagaggtgttttggaagcaggacctatgggacctgcggacatacggggtattgtgggggtcagggagaacttgaaataaagggtggtttccggtgtctgactggaacagctggcagggtggagagggggcagggagggggtcatggggcgggaaccatgatggctcatgatgtatgtcaagttcctggcctggtgtttggcacacagtagacccacaacagtgtaacattaaagaccactttcttttctttttcttttttttttttttttgagacaggatcttgatctgtctcccaggctggagtgcagtgacacaatcacggctcactgcagccttgacctcctcctaggctcaaaaaaatctttctacccaagtttcccagatagctgggactacaggtatacctccacatgcaggtttttcttttgtgtgtgtgtgtgttttttgttgttgttgttgttgttgttttgagacagtctcactctgtctcccaggctggagtgcagtggtatgatctcggctcactgcagcctccgcctcctgggttcaagggattctcctgcctcagagtagctgggattacaggtgcctgccaccatgcctggttaatcatttgtatttttagtagagacggggtttcaccatgttgaccaggctggtctcaaactcctgacctcaagtgatccactcgcctgggcctcccaaagtgctgggattacaggcatgagccaccatgcccagcccccaagggacagtttgagccctggtctgcccaacccagacccctacttggaatccttcagggagaagggggtgttgggaaatgtcacaggcttctctaacagcttattttgagcagatgacccccacgtgatatagaactgtccaacaaacgtgcagattccaggttgtgacattggaaagggttctgttaacttctctgggttctgggttggtgtcttctgactgattgattgccaggagggttttgtttggatttgctttggctcctgcagatttatctagctgggggtgtctctggtagcagctatactgtatacatctaacagcaatgtaataacaatcccgaaatacaccacagcctgttatgtagctgggagaggctaaaatctcccttcccaaaagcatatgggattatttttggtgaggggacatcacacccgtgatatgggaggttttgttattgtgctgtctgtgggcctgcagaaccgatggcctggtctctcaaccccatgggcttcccatgccataggaccaagtccccatgtcctgccttgtccacgaggaccttctcaactgacctttgtggcctcttccactggcccccagttacacagacttcttggtggggttttcactgaaggggccgctgagctgtccagcacccacaaacctgtttccgcccacaccagcgtgcccttcggctctcggcagaccttggcagggcccccttcagcctttctgttggcttttaagggcaaggcccctccactctggcccagtgcctctggggccagatcatcaccctcagggcccgggaagctccgtacaccctccctcgcatgcctgtggggctcgtggcagatgcccagagtggctgcgaaggtggtgcaggaaacgccccctccaggaaagtgtgcctgcttttggaattttccctggggattttccagagatgcaggacacctgttttcctcgcctggtgattgagccgggaagccttcatggagcaggccctacttgcccaggtgaagtctgtgtggcctgcagccacgggggcgagtggccctgcgcctttcatgctgtggcctccttgatatgtacagcctgctttgaagtcctgcaggagctcaaaggaagttcctggggtgagaccagccgccgcagagggaaaagtgtgattggagtggggtggggggtcttagggttggcagggggaacacatgcctccgtggcagctcccggcaccatgggctccctggcagcatcgtccgttctctgagcctgcgaggggcgacacactgtcaccattcttcttcttggattttctgtgatgatgggtcctccgattttattgagggccacggagcacgggggaagtagaagctcaactttttaaaataatatccacagcaacagcagtcaccccgcatcgagggaggcctgtcgtgcgccaggcaggtgcttaaccacccaccttcccttcacaccagcccctgaggtggggggggcttcctcttttcaaagtgaggaccaaaaatcggagagattcaggaactggcagaagtagaaaatgttgccgagccctcattaaagatgcatgcacacacacacattcgttcatttattccttttttatttttttttcattcattcattcctttactcatacactcaacaagcaaacattgagtgcctctgctgtactaaagacaccatcctaggccctggggatgtgcagcagtgaacaggtggagccgatgctgcagtcatgggggaccagcaggcgacagcgtgcactcgggaaggctagagcatctgagacacgcagtgaggtggggagccctgggctgggtacctggcctcgcagatcccatggcgagggagctgggattggaggatgctgagcgagccagccaggcaggcatctgggctaagagcatcccagatgaaggagcaggaggcccaaacctctgaggccacactggtgctgctggccaggcagggcccacttgctgctctaggacttgtgggtgggcgtggtcacaggccggaggacatctgtaaccggccgtgtccccccaacaggccctttattgaagccctttcatgggcggattgggttccccgaggggagccattcagaggcagggcccagcacagcgaggggtgcagaggccggcctcggggccctgggcctatggctgggaggcatctgcatgtgaaagggggtgggcatttactgcatcctgtcttgggccactaaagcacatctgctgggcccagcccaggcccggctcggcgtttttggagccggcggaaggaagaagacttggcccagggcagcctcataaagcaattcccacccaggaccgccccgatcgatcggcctggtgctgtggagccaggcccacagcccttccgtccagtagcacctctcaatcccctgtgtgtctgggtgccttcgggatcctgataaaacgtaggtgcctcctagtaggtctggaacagcgaaggccagggccaggggatctttgaagtccagctggtcctggcaccccagtatcccctccttcatgcccggcttccctggtaccatccagccctagggacacaggtccctgggagtagcagcaatagtaacaacaacaacaacaacaacaacaacaacaacaataataataatgtaggctgtgggcctgggctggaacttcatctctattgcctcatccaacccccacacgcggtgtggcacctgccggaggggtctggcaggacattgtagggagagggccatttgtttgcatttgtttaagccaacaggagttttcctgatgcaacctggaccttggacaaggggtgtttgtcgagaacgtgctgtcgtcacctgtggtcccatttgctgtcaggaggtgaagcactttgtcttcagagatgggagccggtgctctttcaccctgggttctgtgatttcagctgtcatttcaacattttaagtttcataagaaataggtggcctccttatgtaaacattctcaccagcctgtgaatatacagagtgaaaagtccaagtcctccatcctcgaccaagtcccagtgacttccccagggtgacacaatacatccttttccttcgtattcctcaaaagcacagaggattttgagatgcagccttccctgactcttgtccagttctgcgggcacctgccccatcactcttgaatgccaccgccccaccattgcccaaggcatgtgtttggttagtcacaggtcactggaggctggagaccccttgcaggtccccgggccaggagttttgaattctttgtagcctcagagcacttatccaaccaaatgaaattttgagtagaactccaaaattatatatatataatatatatatttatatattatatatatatttatatattatatatatttatatatttatatatatttatatattatatatatttatatatttatatatatttatatattatatatatttatatatttatatatatttatatatattttatatatatttatatatatataaatttttttatatttatatattttttatatatttatatatattacatatatttttatattttatatatatttatatatgtatttatatatatgtatatttatatatatttgtatatatatttatgtatatttatatatatttgtatatatatttatgtatatatatatttgtatatatatttgtatatatatatatttatatataaatatttatgagaacagtgtttgaatagtatattatttttaatagggatgggatcttaatatattgcccaggctggtctcaaactcctggcctcaaggagtcctcctgcctcagcctacccagtagctgggattataggtgtgtgccaccgtgtctagctcagaatggaatatgttttctgtgttcaaatttataatgtttgttctgaggtcaactgatgagaatgatggaagtgtttttatgaataacaatgttgggctgggtgcagtggctcacgcctgtaatccctgcactttgggaggccaaagcgggcagatcacataaggtcaggagtttgagaccagcctggcccacatagtgaaacccccgtctttactaaatatacaaaaatcagctgggtgtggtgttgtgcgcctgtaatcctagctacttgggaggctgaggcgtgagaattgcttgaacccgagaggcagaggctggggtgagccaagattgtgctactgcaccccagcctgggagacacagcaagactctgtctcaaaaaaaatgttgaggtctgcagcagtgaaccacacaacacagtttatatgcttagaagtttatgtgagtgctggaagcgagcttattaggagggatgagtgaatgttttctggtttatccagacttcagactgttagacagctatgaaagaatgacttcgctctgtttggtgctgacattagtttatatgatatgagtgctgtatataccaagtgaaaaagctgtagaataatgtgtataaacttacttttttttttttttttgagacgcagtctcgctctgtcacccaggctggagtgcagtggtgcgatctcagctcactgcaaccttggcctcccgggttcaagcgattctcctcctcagcctcctgagtagctgggactacaggcgcctgccaccacgtctggctaacttttgtatttttagtagagacggagtttcactatgttgaccaggctggttttgaactcctgacctcaggtgatccgcccgcctcagcttcccaaagtgctgggattacaggcgtgagccactgcgcccagcctaaacttccatttttgttaagagaaaacaaaggaaacacaaccacccccgtatatctggggtagagtcataatagaatcacaaacttgaactgtatggaaagagactgaggaaaatctgatggctgcttgaaagctttcccgtggctctgctggcaggagtaaggtctgcttctcagtttctgatctcagccttggtgggcgggggtcaccctgtgaaaatcaagggcagccagggtgggtctggcacaggattattggtttaccctgcaggtgctgcctctggttggaagcccttggccaattacaaggggagtgtggcacaagttacaaagctcatgaatggagtcctgcccctacccccagtgccccacaacgtgcaagaagccatattggcaaagcagtgccacacctgcccactgtggtgtgcagggtgatttcccaggcccccggcaacaggcacgttgctgtccagcttgtagaggaggaacttaaggttcacagaagtgataggacttattcagacaccttttgagggggactgagggctgctgcttctgccagggcaggcaccacctcttacctgttgcaaagcttaatcctgtcacagaaagtgccaggtgtcagctctagtgtgagagcgtgggtttccaatcccagctctgccccatagttgccatgtggcctcaaggaagtcccttagcgttccgtcaccccattatggctgcagctcaagggccccagtttcctatgtgtaattcctgtacccaggctgcaagaattaagtgaaatattttctcttaaaccaatgtttgggtggggcgaggcgactcatgcctgtaatcccagcactttgggaggccgaggcaagtggatcacctgaggtcaggagttcaagaccagcctggccaacatggtgaaaccccgtctcactaaaaatataaaaaaattagctgggtgcagtggtttgcacctctaataccaactactcaggagactgaagaatcacttgaacctgggaggcggaggttgcagtgagctgagattgcaccactgcactccagcctgggcaataccagcgagactcggtctcaaaaaagcaaaaacaaacaaaagccaacgttttcctttttttttaagtttttgttttcttttcctttttaccttaaactatcaggagataaaagccaacgttttacttattccatatctaggagctaaaggagcattttgttgttgaagggtcaaataattttgaagagtgggttgctttgccctttttttttttttttttttttttttgagacagggtctcactttgtcacctaggctggagtgcagtggcacaatcttggctcactgcagcctcgacctcctgggctcaagcgatcctttcacctcagcccccaaagtagctgagactacaagtgcacaccactgcacctggccaatttttgtatttttagtacagacaaggttttgccacgttgcccaggctggtcttgaactccagagctcaacggatctgcccacctcagtctcccaaagtgttgggattacaagtatgaaccaccgtgcccggccatatgaagtcttgtagttgttgaactcggtgtacatgctaaaccaaagcacacagttctgctcaaggagctgtattttccacatctgtttgtattttcatgaagccaacataaaaggattctcatcccagttctgtccctagacaagtcactgaacccctccaaaccacaggtcccatctccaaacagcaggtcccatctctaaaccacaggtcccatctccaaaccacaggtcccatctgtaaatggaaacatgaacccacctctcagactgtcaagaggattcgatgtgaacatgccgttggggctcggtggaggaggagccagtcaccgggcgctgctgtagccactgctggggctcagttcaccctgggctccctgctggtgtaaactttcccctctttctaaaggtgcccctgggcgatacactctgggctcctcctgctggcctccttcccagggcacctggcttcctctcagaatgtacctgccccaacagtgggtttgtcagagacgtggttgtcattgtcaccaccacagcaattactgccatttatttagtatttgaaatgtgccaggtgcttctcatgtcttttttttttgaaatggagtctcgctctgtcgcccaggctggagtgcagtggtgccatctcagcgcactgcaacctctgccacccaggttctagtgattctcctgcctcagcctcctgaatagctgggattacaggtgtgcaccaccacacccagctaacttttgtattttaaatagagatggggtttcactgtgttgttcgccatgttggccaggctggtctcaaactcctgacctcaagtgacccacccgccttggcctcccaaagtgctggggattacaggcatgagccggtggtcaggagttcgagaccagcctggccaacatggtgaaaccccatctctactaaaaatacaaaaaataagctgggcatagtggcgggtgcctgtaatcccagctacttgggaggctgaggcaggaggatcacttgaacctgggaggcagaggttgcagtgagccaagatcatgccactgcactccagcctgggtgactgagtgagactccgtctcaaaaataaaataaaataaaaaataaataatatgatcttcatgacagccctgtccagtagctactgttggtgcctcattttacaggtgaggaaactgaggttgcagagggttaggtgacaagccacagtcatacagggaggaggtgtgtctgcttcccgagctgagctcccaccttacttacaggggcctggcctttgtcccctgcagccaccatggccctcagggacgtcgggctgctgctgaggctcctaggctgaggagtggaagaaaggagccaggatccccacccctcacccccacatgccacgaggcatttcctgtccctctgggccttagtatccccctctgtgaaatgagacactcgggctgtgtggtctccaaagtctctggctgccgattcccatgtacttcattctaaattgcgtttattgattcctgggacatcgatgcttgtgggatcaacatgtccctgtgatctgggctccgtggcacaggcacttcagagaacactctagatgggagttctgccggcaggtgaggaggcgcaggtacgggagggtgtgctgcgtgttttataagtgccctagctgggggccggccccagcttgacctcattgccgtcccgctaaggtgactgcccagctgacccagaccaggaggcccagctaggtcccagctcctgcgtcactgtgtctcttctctccattcaaactttggactctgatgactcaaggctctgtgcaggtgctcaacagcgtctagtggacctgttgccctggccggtcagctggaaggaggagcaagtgcaggaggctcagctggagccagtgtgaggccgtgccctgtgccaggggcccgtggcatctctgctgtgcccagcctttacctcgtctccttcatggcagccctggagagctggaaggctgggcaccaccatcacccatcactgtttatggctcgggttccaagactccaccagcctggtgcgcgcgccagggtgggaagccagaccccacgcccaggggacagatgccgatctgttgctgctcctacctgcaggtggtcccccagcccaagctggtgtgcttcatggtgcagggcacggggtgggctcatgcgcacatcagtgtgggcgtccccggggcatatgtgaataactgtatttttctattgaaaaaacaactctgctctgcttacggggctcctgcttgaccttctgttttggaaaattggatttttggaggaaatcagcaccttgtgggtttcaattctccaaacatgcgtgttcaatctccattgctttccaaaaggggagcgactgaagatctgaaaattagacagtggctagcactgcccagaggccccgttattaaaaacatttcaaggccgggtgccggtggcttacgcctgtaatcccagcactttgggaggctgagactggcggatcacgaggtcaggagttcaagaccagcctagccaacatagcgaaacccgtctactaaaaatacaaaaattagctgtgcatggtggcacgcgcctgtagtcccaactactcgggaggttgaggcaggagaatcgcttgaacctgggaggcagaggttgtggtaagttgagattgtgccactgcactccagcctgggcaacggagtgagactctgtctcaaaacaaaaacatttcatgccagtggcattgctgagggcctggggctggtgctgcacctgcatctcttttcactacaacccccggggaagggggtggtcaatgtcctttcccctctctgaggaaactgaggcattgagcttgtatttctctgcactggttcccatttcagtagtaatagggaccctccagcacaccaggtgatgtctgcaatgtggccccagaggcaggagcaggctgggagttaggaggctgaagcctgatgtgggggagcgctgccccccaaccccactccctgggaaccaaccctccacccctttgccctgctgcctccacacccctttcctctggctgtgaatttctccattaccaagtgggcccgtcagatctggaacttgggtcagttaggtgcttctcccagtaaagcacctactgtgctgggtactgggtactgtgcccggtagattttgggcaggattctagagagcatctggcaaagttgctgcaggaaagggccagtcactgcctgccagtctcggcccctgtgaatgcacgagttgacatttctcaaattccagcctcactttgtgggccaggcagcccttctgacctatgagctgccaaactgagccttttgatgacactgcccccgaggattccctgcagccctatgtcctcctgagcacctggtggcccctctgtggcctccgagaccctggcctgggtgctcactgcccctcatccctacacaggagatgctggggtgactcctctgttggtaaaccaaggctctggttgctgaggatggggctggtcctgcgccagggtgcccccaggtgctgatcttggctccactgtggttgggcaccaggcatggcagaggtgctgagcagacaaaaccctgccctcccaagccccgggcttgcagaggaggcaggaggagggaggtggtgatgtcaggaccagagcagcaccaagggctgtgtgggcgcagctcggaggatgggatctggctgggtgcatggctgtggggcctccaggaggaagaggtgtatgaaccctgctttgtaggatgatcagggtcaggccccaggggagcatgaaagcaaagactcagggtgctatgagggcctctgggtcacacgaaggtgaccagtaccggggctagagggcagggggcccagctgggaggggctcatgctgcccttttcctgaggccccctgctgcctgcccagtctcccctccgagggatcccattctccctccagcctcaggaccctcggcggtccccagagggctagctattgagctgtcccaaggtcactcaggatgtccaataattgtcctaacagtttacctgctgtggaacagtaatgagagggttttcattatttgcgggtgagcgctcctggcagatgccaacagccagcagatgtggagagtccgaggtgatttgtaagggccggttcatctgatgcacggtaattgccccgggcgatgttgtcactcagaggctcgtcctggcctgctgagatgaggtaaaggtcagttcaaagatccagtttgggccaggcgcggtggctcaggccgggtgccatggctcacgcctgtaattccagcactttgggaggccgaggcaggtggatcactggagattgggagttcaagaccagcctgggcaacatggtgagaccccgtctctactaaaaatataaaaattagccgggcatggtggtgggcacctgtaatcccagctactcgggagactgaggcaggagaattgcttgaacccaggaggcggaggttgcagtgagctgagattgtgccattgcactccagcctggctgacagagtgagactctgtctcaaaaaaaaaaaaaaaaagatccagtttggctacaggaagtgggagcaaatccccactcccatgggactcctggggaggaggcagcgtgctgaggtgggggccatggtctcagaggggctatctggcagccaggaccctgcagaaggcccctttccccaaggttcttgggtggtggggtgggaacagcccatcccagagctgggcttgtccttctttgcaggggctctttgtacagctctctgcaagccttgctggggtcctggagccgcacctgactagggctttcctgatattttggaattcttgtacttcatgcctcccaaggcttagtctgtgacatctggtggcaggccccacggagggatgacaagggtttgcttccttagctgtcctagtcggcctgggctgccataacaagtgccattgactggggacttcaacagcagacgtttattttttcacagttctggaggctggaaggctgatatcagggggtcggcatggccagtttctggtgaggccccttttctgggcttgtaagcaggtgccggcttgctgtgtgctcacatggcctctttgtgcattcatgagggtgctctctggtgtctcttcctcctaggacactgatcctgtcatgtgggagtcccacccttatgccttcatttcacctgaattactccacaaaggccctgtctccagatgcagtcacattgggggttaggactccccatctgggctcacaggccttgctgcttacaagctgtgtgaccttggtcaggtctctgtctcctggggcctccatcttctcctttctagagtggagataatggttcttgcctcataggctcgtttacccagtgggtacgacttactgagggccacctgacagccaggcacctgggccttggggatgtccattagggacagcaaataccttgggcacgaggacaaaatcagatcatggatcctgagtgacaccaccgtccttacccagatgcaaggctcagtataatgttgtattaatattttactctttaaacaatagtgcctactttctttattttcagtaatttaaaataaggaagaggcaacctggggctggtccctggtggtcagaatgggtctctggtgacggctcaaaggggggtgtggtccggggcgcagaaggacagaacccaatgggagcggacttaccccagcatttcacatccgatttttcagggatagatttcgtctctaaaactagcacttgatattataagagcatataggctgaatgaacttatattgctatttcagaggaggccagtggcttaagagtcccaaagtgagttctgtgacttactcatgtttcatccacatctgaagttgtgtttggaataacagatgtgaggcactgtcatctcactgtcacatcgattgctcactgttctgagaaggtcacatcatcattcattagcaataattagtcccaggggaccccctgcacttcttcactcaactgctccattaacttgggtgcaaatcacacgttccaggtgccaatcaatggagatctatccataatgtacaaggtgacgctattagttacaatatattaactgcctaatttaaaaataaaactatctttatgaagggcaattaaccactaagtgtaattgataattcataaacctctgattaggaaagacaaataataagaaaggaatgaatcacccatcctattgaagaagacgttgccagcctctggtctgcattcactatgtggtcagcagatctacagatttcttcctaaattgcacctgtcagctccagggctgggggtctggaggctcatttcagtgcagaaacatgtgttttcaccactgaagcctgtctgtttctgttgggggttataaggaggctgcaggctcaggacaccctcagggaagtagtgggtgaggtcatttagacttctcagtcagtcagtcattcagcaaatgttaatgggggattgtggagtgccaagccctgtgggaagccctggggatgccgtggagacccgaatagattcatccctgaactcctggagctcgtaggccagtgagaaagacaattgcgtaaatcagatgattggagacactggttagtgttacaaacaaaaactgacagagacagggcggaggcaatggcacactggatggtgggaggaagggacattggcctgagtcctgccacctttttgtagtagctgtcactaccactcatggctgtatttggggccctctctcactggtggggaatcgtgcctggcttatctgccccctttttttttttttttttttttgcgacagagtctcactgtgtgacccaggctggagggcagtggcttgatcttggctcactgtgacctccacctcctgggttcaagagattcttctacctcagcctcccgagtagctaggactacaggtgcccgccaccacacctggctaattttttttggtatttttagtacagacaggatttctccatgttgaccaggctgatctcaaactcctgccctcaagtgatccacccacctcgacctcccaaagtgctggggttacaggactgagccaccatgctctgccttatctgccctctcagtggtcctccactccagcctcatttcctggctccaccttccacataccccacgctgctcgagttctttctatccgagagggtggggccagtgcacacctgcctgtgcgcaaggtgggtggcccttcccaccacctggcctgccctttcctgccatctccttgtccgtccctcaggtctccagttgggcctgaatccccagtcttttaagaccccacactgggctgtgtcctttccccactatgtgggagagctccaggagtgctgatttcctgttcctgactccactgtgtgtagatatcagctccatctccaaagtctcaggctcaagagcggaacagaaagcccttgacatttctgggattcagtccctcacccataacatggataaattacattcacactgggttcagtttgagttgagtttttagttgggtctcacttgctcagatggaagttgatttcaagccgtagttctagtaactgggttgaatctgcgtgtattcatttcattgggccacatctgtaaacagaacttgagcacatgcctcctctctatgtgtgttttctataaattttaaattattcatttaacactattgcttaggttataaaaaatacacaacttgaaagaataggtgaagagccaagatgtctgcatctttggagatcagtggaatgtgtgtgtttcgggacctgtctgagaacagtgccagatgcaattagcatggctgattaattttactagggtttcttaaaagtgcctcccggcccttgggcttgcagcttgatgtcttttccacgagtccacactgcagctccatgcagatgtcaaatatgaccgctgccttgttggggccggtttgtccaggaagggatcttgtgatcttggcgagggagccaggtcctgcctgtcaccctccccccaggtctgagtgacccaccccgcctgcctctgtaggttcctctagcacgctcgggtcccttcctggtgggcgccaggtcctccagcctcctctccctgcacagaagcaccacaccctggccctctctcttgcttccccagggaggcctcccctgaccttcctaccccaccttgtcaccctctgtctgctcaccctgtttatattctgcatagcgtctctctcttctcagtcacaaattgcccttcctttgcagggtctcttgttcctattccaacctcctcctattccaacctggatggtggcctggagatcagggaacttttccatgctcacgactacagctctgtgcaccaggccagtgccaggcacgtagtaggcgctcagtgacagtttgcagaagggtggatgttacttcatttggtgcgttctgagaacttgcccaggtgcagcctggattcgcgggtctcctatgaagtcaggagggaagaagctcggtgccgccggccagtggcagcatcctgaagttcatgagacctccaggctgggtttgggcagggtccacgtcctgtctgtccatcccggaatgttggtgtccctgatgactttggcaaacctttctccattgacagtgatgagaagacaaacctgtctcgggccatctgcctttgtactttttgggaagtatggatccagagttagtaaggcgtggacgtgtgcagctcacttgcaagtggaaatgccaaatgtggtggaaagggacagagaaatagctgtggacattcagaggtggcccctagccaggctgagcaggattgtggagaggaggtattgcatggatctcaggggctgggtagaagtggccaggcaggtgggccaggcacggtggctcacacctgtaatcccagcactttgggacacctgaggtcaggagttcgagaccagccttgctaacatagtgaaaccccatctgtactaaaaatacaaaaaattagccaggtatgatggcaggcgcctgtaatcccagctgctctggaggctgaggcaggagaatcgcttgaatctgggaggcggaggttgcagtgagctgagatcatgccactgcactccagcctgggcgacaagagcgagactccatctcaaaaataaagaaataaaaaaaataaagaagtggcacaggtagagaggcggggggacagagttgcattccaggcaaggggagaggcaatgaaaaggggggtcaggtggggaacctcggggagcctcaggtgtatgaagtccagtgaggatggaaaagagttgtcggggcgtggtatgggggtcctctgagaagggatctgcttcagctcagaaatcccagcctgaacacatcctggatcagccaggaccccctcaggggctcgcagtggcctagtctgctctgggctttgctggatgcccttcgagaatcaccgcgcaacctccttcagaggcccaacactccacgtgctgacttcccgggcctgtgtctcccctgccgcagactgaagcgttcccggctgaaggtgaggttctgcaccaacgagtcgcagaagtcccgggcagagctggtggggcagcttcagaggctgggatttgacatctctgagcaggaggtgaccgccccggcaccagctgcctgccagatcctgaaggagcaaggcctgcgaccatacctgctcatccatgacggtaggcctgtcggacaccaggacctcacgggggtgaaagctcccctttcccagggtgggggctgtgcagagagcctctttcactgggccaaaccactgactgagctaggccaccaacactcatgggttgggggtaaaaacctcatgggacttcctgctgggggctgggggcaggttaggacccagctctgtccattccttggcctcacaccagagggtccttagagcaggttctggatggctcctgggaggaaaatcctaggctctctttcctgatctaggatggaccaagcggccagggaattgtcaaggtggcggagttctagctcctgttgagaaagagacagagagagagagagagagagagagagaaaatgagaatgagaatgaatgaatataaatgagaagctacattgaggtccatagcttctaacgtctggcaccatagccttcaactatgtgaaaaccagccctgctctttggaacagtttgcaaatggcgtaggaacaaggtttgcatcctgattttagtctgaatgcaagaacagacagcccctttgaccctcagtggggaggttttcttggaatgaagcagaaggaacaatattactggtgcctcctgaatatttaaaaagaagagacattagcaattccagacacttctccattggtccactgcaccttcttccttcctctgcacttgatatttttagttttacaaactgctaggcagaggcaaacatggttttttcctttccagggcaaggtgggggctctcaagaagtggcgggtgctccctggaaagcctagatgtcgacttcatagccctggtgccagttaagggtgacaggcctggcctttagaaatcatgtttctcaaaattccttctctgtaatctaggatccctgctagtgcctttagaacatggtcttcaaagaaagaagatttaagaaaaatatcttgccccaccctccagaaaagggttgctggacccgggagtggagctggaagaagccagcaggagagggaagtgggcatccgcttggagggtggccttggccagtgaatcagacaagcagacggcaaagctgggaggctgaagggaggatgaatgcccttcctcagctgtaatcctgcatccgtgttttcaataactagacccttgttttcagacttggaattttttttttcagtcattggtggattttctgtctaacattttatgaaaattttcaagcatccaacaaagttcaaataatttttacttggaatagttttggttttttttttggagacagagtcttgctctgtcacccaggctggagtacaacagtggtgtgatcttggcttcctgtgacttccgcttccctggttcaagcgattcttctgcctcagccccccaagtagctggggttacaggtgtgtgccaccacgcccgcctaatttttgtatttttagtagagatggggtttcaccatgttggccaggctcgtcttaaactcctgacctcaggtgatccacccaccttggcctcccaaagtgctgggattacaggcgtgagccaccgcctccggtcttacttggcatagttttatacccttcacctagattgtcaatgacattttttgatattttcttcactttatatccatccatccctccgtctgtctatccatgttattatttagatgcatttccgagtaaaatgcagacacgggtatactcccctatacacttcagcatatcattggagtttggtatttgtttacggtttttcctgtttgatgtaaaatttacatacaatgaaatgtacacacgtcaagtgtacttttgctgagttttgacatatgcatgcacccatggaacccaaccccgtgaagagctagaccatcaccatcactgacagctctgacagctacctcgcaccttgcccaggtggtcttcaccccttgtccccttagaggcaaccactgtttggattttttccgttataaataagttttcctattctagaattttatgtaaatagaatcatacagtatataattgtgctggggcctccagtgctacccccaggctgaatgattcattagcaggactcacagaacttagaaaaggtattacactcccagttagacttattactgtgaaagaataaagattaaattcagcgaagagaggagacacatggggcaaagtctaggagaagacaggcatgaacttccagttgtcccttcgaaatggagtcctactgggcacacttgattctcccagcgatgatgtgtgacaacacatgggaagcattggccaccagggaagctcactggagcctcagtgtccagggtttttgtgtagacattagcacctgtgtgactgactttagcgactcagtctccagccccacagagtccaaactgatacagctgggccagggccgcagggatacagaaacaggtgttcactgtaagccaagctgttagcgtaaatgatctggtcagactgagagagcagggcccgaggccttgagcatacaaaaccccttatcaggtagaacattgcagtggctcagaggttatctcccaggagccagtcctgaagacaggccttttttggaatgtacagggtttgagcaacctagtcctgctgagttaaccctttccgtcacagtagtcttttgtgtaaggcttcttttacccaacgtaatgtttttgagactcatccatattattgcatgtatcagcagtgttgttcatttttattgcagaatagtattccattgagtgaacagaccacagtttatccattcacatgttgttgatacctggattgtgaccagtttcagtctattatgagcaaatctgctatgaacattcttacacagttcttttgggtaaatacctagcagcgaaattactgggtcatagggtacatgtatgttcacctttgtaaaattctgccagacctttttttcagagggattgcaatattttacacgtcctccatctgctgcagctgttcagtatcctcaccagaccttggtgttatcagtctttttaattctcaccattctggtgggtatgaaatcgtatctcattgtgtatttcagtttctttctttcttttttttttttttttttgagacagagtctcgctctgttgcccaggctggaatacagtggtgcaatctcagcccactgcaacctctgcctctcgggttcaagtgattctactgcctcagactcctgagtagctgagattacaggcggccgccaccgtgccgggctgattgttgtatttttagtagagatgggattttgaccatgttggccaggctggtctcgaactcctgaactcaggcgatccgcccaccttgacctcccaaagtgctgggattacaggcatgagccaccgcacctggcctcagtttcttttcaatttagaaaggtcaacatctagtcctaagagagatgacagcatgtttcttctaggatctgaaaacacagatccaatgatttgatgtatccttgcaaattttcctattttaatttaaaatgggggaagacaaagaaggagaaggaggaagagagtttcctaagggagctggtgaactggacctgtggggatggaattctgctttttcttcaggacatatgtgtggggttgcctgaaatgtgtcaacggttcttacagtttgggaccagtagtgccaaccctccaaggcttgtgcagccccatttcctcctgctgcaggctctcagtgtcttctgagcagatttcccttctcagtagcaaagctgtgggtttcctgcctgcgatagtgacctcagggagctcctggggctgatgtggtattgggatggagggtcctgggtgtgtccacctttctcctcataagccctctctgaggagccgaattccctcctctgtcaaataggaataacccttctgtgtctacctcccatggcagctgtgatgatcagaaagaaatgcatctgagaaagggggaggacatgtgaaaggtgtccctggtaggagatggggaggtaggccatgtcctcccagggctccgtggcactctgtctctctctctctttccaggagtccgctcagaatttgatcagatcgacacatccaacccaaactgtgtggtaattgcagacgcaggagaaagcttttcttatcaaaacatgaataacgccttccaggtgctcatggagctggaaaaacctgtgctcatatcactgggaaaagggtaagttggctccagggagagtcatttctcggtgctttagatgatgctgtgccagtctccaacttgcggaatcaggcagagaaggatgcagaaggggaggtgggaggagcaccggtgatcttcttttccctccctttttcatgctttctctcttcatttctttattcctctcctttaatcatttctttaggaaataggaacactgtcttcaggagctggttgatcaagcttccatgtggagtctagactagaagagggcgtcattgcagagggagaccctctggagatctcagaggccaagtgttgattgtcccaagtttagagcaaagaaggagaaggtgcatttgcataggatgtagcagggtgttggagaatgctctcaagggttgtctaattagtaaaacataggcttgagggcctacccagtctgggcaccgacagtctctggccacagatcactgtctctgtgaagttgtgattttgtgatcagtgttttgtctgagcctttagcacatgccttgccatctctttcttaaacaaaacagtgttggttatttttaacatttttcttacactgagatagcacatgttcattgaagaaaaattagacaatacagatgagcaaaagaagaaaccagaaagtatttttagtcccactgcacgaggaaaacacctgtccctattttggtgtatgtccttgcaagtggcttcctgtgcgaatagactattatggatggagatgttcacagcatcgatgtcacacttgaccttgttttgtcatctgttttttattgttcaccaaacaatatttgtgactgacttagcatgcagcaaatggatatgtcttggggcatggttatctatggtgtggctatcttgtatatatatatattttttaagactgagtctcgctctgtcacccaggctggagtgcagcggcgtgatctcggctcgctgcaacctctccctcccgggttcaagcgattctcctgcctcagcctcctgagtagctgggactacaggcgcccgccaccatcccagctaatttttatatttttggtagaggcggggtttcaccatgttggccaggatggtctcaatctcctgaccttgtgatccgcccgccttggcctcccaaagtgctgggattacaggcatgagccaccgcccccaacctcttgtaatttttttctttttttttttttctgcttataagtttattcaatgcaaaataaccctcaccagttttactgaggtggctgaccatgtccacgaccaaatacgcctgtaaactgaaattcggttgctgacccattcccagcctcagctttctcactggcaccagggggacagcactccatctgtgggtgtctctttctctctatggctgtctgtctgtgggtgtctctctctgtctgtgggtgtctttcgccatctgtgggtatctctctctgtctgtgggtatctctcccatctgtgggtgtccatctctgtctttgggtgtctctctttgtgagtgtctctgtctgtggttgtctctgtctgtgggtgtctctctgtgagtgtccctgtgagtgtctctgtctgtgggtgtctctcctcgtctgtgggtatctctccctgtctgtgggtgtctctgttggcttccccacttgtgggtcttgcaggtcggtcacgctccagacctttaggccgcagcctgccagtctccagaccgctgtggcatggggtagcagacacgctctccaggggcagatggtggtaatcgcagagattctggatccccatgtgggtgaggtaccagtagaaatgtctccaggcaaactccttcctgcaacctcaggacctgagagactgcctggccttcatgacgtgaaggttgggcacattctcatctgccagctccgggtcttaggcaggtggacattcttcttggctaccgtgactccctccttaaaaaggagttcataaatagcaatctggttcttcttaggcatcaacatctctgcagctgtagggtccaggtccggggctggaaagcatgatttttttctaactgatctctgctgatggcatctagattgttcctggtttttcaccataccagggctgtgatgagcatcttggtgcatttcggatgacgtctccagatacagttacagaacgagtatttttgaggttcttgaggcatgttgccaagttgtttccagaaagctgcacagacttattctgcacagcctagaattctagaatcacagggttctgcacaacctagagttctggaatcacagggttctgcacagctagaattctagaatcacagggttctgcacagctagaattctagaatcacagggttctgcacaacctagagttctggaatcacagggttctgcacagcctagagttctggaatcacagggttctgcacagctagaattctagaatcacagggttctgcacagcctagagttctggaatcacagggttctgcacagcctagagttttggaatcacagggttctgcacagctagaattctagaatcacagggttctgcacagctagaattctagaatcacagggttctacacagctagaattctagaatcacaggctcccagggttgcaaggacactttggagtgtctacctcagcatctcatgaagtgtgggaattccgaggcggtggcggaggaagtgttttccatcttcggtgctttcgttgcttctggtgacagcgctcactgcctctgcttgctgtacgggaccagctgatggaaccgacagggagggactttttatctggccattggccactgccacacactttgtgtaccccgttttgtgtaattctgactacaaccttgtgggatctaggcaggtcattgctgttttgcaagtggggttgttgaagccacaggagatgaaataagctgctgtcccccagccattgagtgctgataggatcaggagtgccagttggtgtggctgaccccagaccctgtgcgtgttacctctaagctacattctagagcagactttttgcccacacaagccttaaatgtgggctggggacagtggctcacgccggtaatcccagcactttgggaggacaaggtgggcagatcacctgaggccaggggttcaagaccaggctggccaacatggtgaaaccctgtctctactaaaaatacaaaaattagccaggtgtggtggtgcgtgcctatagtcccagctactcgggaggctgacgcatgagaattgcttgaacctgggaggcagaggttgcagtaagtcaagactgcgccattgcactctagcctgggcgacagagcaagactccatctcgaaaaaaacaacaaaaccttaaatgtatttttgaggctgtgtttaaaaatggggatattttacacaaaatatccagatttctggattcttttgaagaatcagaagatctgacaatacggagcctcacattcctgcacacacagcagccatagctggagccactgcctccattagtttgaatttactgcagaccccactcctccctgtcgtccctgtctccagaccacagagttagttgtcattgatcgtgtgccatttgttgtttttttcaaagtagagaagtacttcttcacgctgtgtctctatcaaaaatggacaagtgaaagatgtttcaagaaatgaaaagatttttttagtgacaaaaaatttctagtatgtttctcatataaataaaatgtgtcctgtatgtagtcagggttcctcagagaagcccgaagctacaggatatagatatgtagagagattgtggaggcttggcgagtccaaaatctgcagggcagggctggcaggctagggactcaggaatgcgcgcagcagagtcgtaaggctgtgtgctggtgggattcttgctcggggaaggtcagtctttgttcttgtaaagcctgcaactggttggatgtggtccacccacattgcggaagggaatgtactctcctcctagttcaccgatttaaatgttaatctcatccaaaaacaccttcacagaaacatccagaataatgtttgaccacatatctgggcaccgtggcccagccaagttgacatattaaattaacccttgtagtccctttttaaacttacacccattgcaatttaggtcgctgctatggagcaagccacagaacctggcctcttaactcatttacccgggctgacccattaggcctttgagtcaccaacacctcactagagaacaagcataatgaagaagctctgctgtaattcgttaatgttaacacttttttctttaaagatgtctcatgctgagcttcgtggcacacgcctataatcccagcactttgggaggctgagatgagaggatggcttgagctcagaggttcgagaccagcctgggcagcatagtaagattccgtctctacaaaaaagaaaagaaaaaaagttgtctcataattattaaaaaccactattccagatcatggataataatagtcagaacaggtatattgttgaaaaagaaaaaaaaaaaccggaagcagtcgctttcagctttgtaataccgcagcaaatgtcatagtagacaagggtttttttaaagtaggagattagtggcgtctctgctgatgggggttctgggtgtttaaaaaccagagaaaggaaccggcggttttagggactaggtcccagcttctcaggacagcctgaggaccccccgagagctgccatcaccatgccgtcctcggctgtgggtcactgctggtgaggtccatcctgcactgcgggacacaggggcacaggctgagcggtgcccaccaaggaggcaggagcagcgggtggaggcgccggggcagactgtccctctcctggaaatggagtgatttacatttggcatctgtttggaccccagagtgggaattggctttgtaatttcttctgtcatgccgctctcagaaaattaagctgtttacccgacagactatggaaggttaacggctcttctgggaaaggtcaagtggtcatttgcagggaggctgtgctgaataatctgaaacggcagaagaataaagcataaaatcgcatctgactcctcctcccgggcttccccctttctttccagcatccacgggttcctctttgtggctagaacattcacgtcctaagtggggctgccgttggctgggttaaaccagtaaccagtaacaggagaaatacgtcgcatctctagtgtgtggagattaccgggcctttatattaaaaaaaaattttaagtgcttatatttgctctgtctctaaaaaatgtttccaggtaacagttggcctcaagatgcctttttgtttttctgaatgaataaggaataaagaaaaattctgggcactataaaatcaagcccagattcagttttttaaaaaataaacgttaaagtttctcattttgatttctggaagttcgtgttctccttggactctaaagattagcatgcaaagacaaggttttgattgtgtattttcagttgcacgttcagtttttttaaaatcccatccaggactaaatttaaacataagaaaatccaggtttctttcgctttcgaagaggctgcagggaacttgaggccagaggaagtggcgccgcgtgggtccccttaggaggttttgccagatgatgggaggtgcttgctcccgtccacccaacctctagctcctccagccggccccagggtagctgagggacaggggtctgggcccagaagcccccagaatcctcagctccaaacagagctgtacctgtcgcaatggagtagttttgttgatttcaggttttcttttgttgctgggtaagcatttcctgtgtggggtatattctttcctccgtcctggcttacttccacacatcacttcattagggaggccctccctacccacctcgatgccctccttctcctggcacaggtgggcaggaggggacgagggtcatggcctttgagggcctgcagagggccttgcctgtggtggcgtggccaccctggtcctcagcagggtgctcagtggattccaaggtgctccctggacccggacctccccttcacttccttttagctcaggtctcagctttccatgcctctgctgcctccctgaacccagcctgtcccccgccctgttcaagcagactgcccctcccctgggtcctgccctttaaagtttgtctgtgggcttctttgcttccccaccagactgtgagtccctgtggagcaggctggggctgggagtatccctgagtcctgcaaagggctgtggagcatctgggatcgttaatgccaagggggaccaaggtaacctgggccatttgcagcaccagccagtgcaggccccaggacccggtgtcccctcactgtttcctgagaactctggaccccactaaggaaaccatcagaccaaagtagctgattgtccaactgggaaaaagaaaaagcagtacttttttaggccatgtaaatgcaaaatatacatttgaagtctgcgtttaagacatgaacttagagatttctaagcctgtttttgggggtcactctaaaagggagggcattttcaggtcccccctctgtgagcattcacagcatcccagccagcctgtatccctgtgccgtgaccccagagcacagagcctcagaggctgtggaacaggcctggggttcacgtggagagtcccaagcccacgtcatgacaggagatgcccacaccttcaacaaacagactccaagctccaaagctgcctaacaggagtggcagggggaccagccctggcaaggcccaggtttggctgaagcccgtacctgcagcccagcttgtaagtttagccgggaagcatctgaggcaggcagtggaggacgcacaggggtgagcggttcatctcacaggtgtggctgggtgcctgctacagcttcaaggcatcaggtggggcagaaagggacaggcagggtgcccaggagtggcggagctggaggaagggcacagccccagggcagctcccgaggagctcagttctcacaccccaggtggtcacagaacacatttcagcccccaaattgaacagggctgtgttcattttttccttcccccagctcatcttattgcttgtgtcagcctgggtgaaaggttatttataataatattctcctgtctcatctgggcagcttctgcatggaaggtaccgagttaataactttgcatgcgttattttgttcaagcttcacagcaatccgtgaggtaggtattgtttgttgttcgttttgcccattttacagattaggaaactgaggcccacaggcgtaagcaacccaaagtcacaccgttagaaggcagtgagatctgaatgctcaagtcagcatgcgctcttcttccctctcgttttctgcatacgtgctttctccacgtctcccatatcgtaagggcatggcaggaggagagggaaactgatgtgatggtggatggcaaaacattttagtggttccaagaatcaagcccccttgtgtattcttggctttcaatgaactgcgtcttcagagcagcgcaggttaaaccactttctcgcctcattgtagtcaattggcttagttcagccagagccaggtctggcccaccatgtgtctggactgtgagtgccttgaggctcagtgtgacgcgatcgtagggtgagcctggccgggctgcagccagccaccaagccagccctgggctcaaagagcagtgaggccattttgagagaggaatgctccctcgtgcagagcctgtctccacctccatgagacgggaaggaacagttgtcttctcataaaagcatctggcgcccatgaaacctggcacctcgcttgacctccggctaacgggatgcggcagggtgctgtggaactaatggagttctcttcttcagccagcaattaggggttaattattagcaattaggggttcgccacataccccgtggacctgctgttccttcccaggacacaggtcacttgtcattctctgtgttagcaactgaaaccgtctgccttctgggtcccctgttaatcattgcagcagggtccccacgagtctgacagcagggttgcgttctgtgcgacctgtggcatccctggagctgctggctgctgcgctcgccccactgggtgtggcggcctgccgcccggctctgtggtgctggtcccctgcggtcattctcagcgtagcgcctggactgcccctcagccgcggcttggctctgcagccagcgggacaggcccggtgctcagctcccgatacttagcatcctgcggtcagctccccgtgctcagcatcccgtgctccgttctgctctctcctaggcgttactacaaggagacctctggcctgatgctggacgttggtccctacatgaaggcgcttgaggtaccagccctggttctgtcccaaactctcttcagacctcagggcacctgggactttttgggtctttgttgagaagaggctgtgcttaattaacgtacaaatggccttttgggcttccacaaaggctgccttcctattctgggctcccctggccgggccctcgggccctcaggccctcagctgtcctcctccctccccatctctcccttcccatccttcccatcctccccatcctccccatcctccccatcctccccatcctccccatcctccagtgggcgcagccccccctgcccgccgtggaccctgccgctctcccagctgctctctgccacactcctctcgggcttgtggcttctgtatcagtgctgaccaccgctctcattcctgaccctgggcatctgcagcacctcaagcttgacgggtcctcactggcctccttcctgacttccccttcagtttccaaggccatctgtggccaggcctccgggtggggctcccctgggtccactctggcccaggtcccattagctgccccaggtcagcctcacatcccgtcccatcctcacagctgcagcccctcctgcctgcctgccgtcaggtgggagggagaggcagacgagcagatggagccctgtgatgagctgcgagtgggcaggggagaagagggggagaagggatgagaggacggaattgcaggcgagtgagcagagcactgctctgctggcccttgggagccctgtagttttgccagctcttggatgccttctgctgtgggtaggcctttgagtggatggcagggtgcctggtgctaggggacctgagtgacccgggcagccctttctggagttgtgaggctcctgcctgtgagatgagttctcaggcccacagcatcctgcttcttcaaggcccttgactcttgggggcacatttgggacagtgtttccgtggctgggcatacacctgttccttgatcccaaacttatgccatgtccctctctcttttcccagtatgcctgtggcatcaaagccgaggtggtggggaagccttctcctgagtttttcaagtctgccctgcaagcgataggagtggaagcccaccaggtaggttggcgccttgtgaagtgggtcaggggaggcagccccgtcagggaggccctggagcttggaatggattacaggactcaggcagcctgtggggttggccaggcagccaagcgtgggctccctgtgaaagctgacctggctgggaaggagggggaagacagcaaacgaaatccactgaatagtttcaaccgtgaagttactttcagtatgaaagcaagaagcagaaatgcctgcggcttttcctgagtttttgctgcttctctgaaaggataagaattgacaagtcctatcagtgtgttaatatatctcactggcaagacagtgtaacagcaagattacaacaatatggaggaaataataaagtcactcattttgcgacctttatattttgactattttgggatagattgcctttcaaacttccaaattttagaaaggaaaaagaatcggttatgattttattgtctacacctaccccaaccctaagtgagtctggcttcgtcctccagtgggttttcttttctttttcttttttttttttttttttttttgagccaatgtctccatttgtcaccctggctagagtgcagtgtagtggcacagtcatggctcactgcagcctggacctcccaggctcaagcgatcctgccatctcagtgcccccttaacccccttactaaccaggccccccccccgccaaccccaactgagtagctgggactacaggtatatgccaccacgcctggcaaactttttttttttttttttgagacagagtctcactctgtcacccaggctggagtgcagtggcgctgtctcggctcactgcaacctccacctcctgggttcaagcaattcttctgcctcagcctcctgatgagctgggactacaggtgtgcaccaccacaccagctaattttttatttttagtagagacagggtttcaccatgttggccaggctggtctcaaattcctgacctcaggttatctgcccgccttggcctctcaaagtgctgggattacaggtgtgagccaccatgcccagccccggctaacttttgtattttccatagagatggggttttgccatgttgcccaggctggttttaaactcctagctcaagccgtcctcctgcctcggcctcccaaagtgctgggattacaggcatgagccaccaacacacagccccctccagcaggttttctgaaagattgtaaggaatagtgggcagccggcatggaggctgacgcctgtagtcccaacactttgggaggctgaggcaggtggatcacttgaggtcaggagtttgagaccagcctggccaatgtgatgaaaccccatctctactaaaaatacagaaaaacaaaaaaaattagctgggcgaggtggtgcatgcctggtaatcccagctacttgggaagctgagggatgagaattgcttgaacctgggaggcagaagttgcagcgagccgagatcatgccactgcactccacctgggtgatagagtgagactccttctttaaaaaaaagaaaaaagaaacagagtccacagctgccccaggctgtcctgctgcctcctcagaagtgggcagcagaagcatgggttgggggtccctcaggtgtcaagcctggtgcatgtttcccctgtgtgcatttcggtccagaacactggtgcctcatggtgctttgagaaagatggcccaaagctgccaaaatctagacactgcacctgcacctgccctgagatccatagagatgtcagaagatgcaggctgtctggagtccccagaaaacacctgggaaatgtcacattagtctgttgagaaggaaaggtttgtgttttgaatgagtgagaactgcagcaataaataacctggctttttactaccttgcttcatagggcagaatttctttttttattagagatttcaaacatacagaaaagtagagagaatgatacagacaccccattatatccatcatccagcttcagtggttaagattttgccacattcctttcttctatcctcttttttttccttttaaaaaatttactggctgggtgtggtggcccacgcctgtaatcccagcactttgggaggctgaggcaggtggatcacctgaggtcaggagttcaagaccagcctggccaacatggtgaaaccccgtctctactaaaatataaaaattagccgggtgtggtggtatgcacctgtaatcccagctactcaggaggctgaggcaggagaattgcttgagcccaggaggtggaggttgcagtgagccgaaattgtgccactgcattccagcctgggcgacagagtgagactctatttccaagtaatagtaatagtaatgataataataaatttacttatttttttgcttcatattttaaagcaaatctcaattgtatcctttcatgttgtagcatgacatttaaaaatcacgatttttggatgtaaatacaatacattaaaactcctaacatggccaacaggcatacaaaaagatactcaatatcatcattcatcaggaaatgcagatcaaaactccagtgagataccacttcacactaagatgactgtatagttaaaaaaaaaaatagaaaataacaagtgttggcaaggatgtagagaaattggaacccttctctattgctgctgggaaggtgaaatgacaatgctgccacggaaagccacttggtggttcctcaaagttaaacatagaatttgccgtatgactcagcaacccatttccaggtctatacccagaagaactgaaacacgtgttcaaacaaaaacttgtacacagatattcatagcagctccatacacaatagccaaaaggtaaaaaaagccaagatacctgcccatcaactgatgaaaggataaccaaatgtggtatgtccatacagtggaatattattcagccataaagaggaatgaagttctgacacatgctacagtgtagatgaaccttggtagcattatgctaagtgaaggaagccaaacacaaaaggacacatattgtattcttccatgtatagcaaatgtctagaatgggcaaatccatagagatggaaaggagattagtggttggcaggggtcgggtgcaggggaatggggagtgcagcttcagggtacgaggtctccttttgggatgatacaaatattctggaactgggccgggcacagcagctcacacctgtaaccacagcactttgggaggctgaggagggtgaatcacttgaggtcaggagttcgagatcagcctggccaacatggtgaaaccccgtctccactaaaaatacaaacattagccagacgtggtggtgtgcacctataatcctagccactcgggaggctgaggtgggagaattgcttgaacccaggaggtggagattgcagtgagccgagatcgtgcaactgtgctccagcctgggcgacagagccagactctgtcttaaaaaaaaaaaaaaaaaaaagaaaaatattctggaactggacagtgatgatggtggcacgacgttctgaatgtgctcgatgccagtgaattgaatactctggtcacggtcataaattttatgtaatgtgtattttaccacaataaacattttaaaaccacctaaaaaattaacagtgatttttgttagtattatttaatagcaacccatatttaaatttccttgactgtctcagaaatgctcttttaccgttgatctgttggaatccaatctgaagaagctccgtgacttgtgtgtcgtttttatgttttctgagcctctctttttagccctccatcatagaacatttgaaatatctatgtcagtagagagggcagctcagggaactcctaggtacccatcactgtgctttaataattatcaactaataaccactttaaaattgttttcaacttttcattttgaagtaacttgacactcacaaaaagttgcaaacatagtacaaaatgttcacgtgtaccgttcagcagcttccccatcatcatcgagcagtgataaaaccgggaaatcaacactggcacaaggcggttagctaacctagagagcttattcagacaccaccagtcatcccactcatggctttctggggacacgttgcatgtagcagtcatgaccctagtgtcctttatctgtgaactctgatcacctgttgaggaggtgtcttccagagttctctactgtcattgctatttgtccctttcagtaattatctttttttttttgagacggagtctcgctgtgtcacccaggctggagtgcagtggcgctgtctcagctcactgcaagctccgcctcctgggttcacgccattctcctgcctcagcctcccaagtagctgggactgcaggcgcccgccaccatgcctgagtaatttttgtttttgtatttttagtagagatggggcttcaccatgttagccaggatggtctcgatctcctgacctcgtgatctgcccgcttcggctcccaaagtgccgggattacagacgtgagccaccacgcccagccttttttttttttttttttttttttgagcaggaatctcatcctgtcacccaggctggagtacaatagcatgatctcagctcactgcaacctcctccacctcctgggttcaagtgattctcctgcctcagcctcctgagtagctgggattacaggcacctgccaccaagcccggctaatttttgtatttttagtagagacagggtttctccatgttggccaggcttgtcttgaactcctgacctcaggtgatctgcctgccttggcctcccaaagtgctgggattacaagcgtgagccactgcatccaaccctaataagtatcttgtgggaaagttctttgacactatgtaaatattctctttctgatcattagttctaattttggcatctcttgataattcttttatttttttattttttgagacagagtttcactcctgttgcccaggctggagtgcagtggtgcctgggctcaccacaaccccctcctcctgggttcaagcaattctcctgcctcagcctcttgagtagctgggattacaggcatgtgccaccacgcccatctaattttgtgtttttagtagagacggggtttctccatgttggtcaggctggtctcaaactctcaatctcaggtgatccgcccgcctcggcctcccaaagtgctgggattacaggcatgagccaccacatccggccttcattggtgtattttatgtgtggcccaagacatttcttcttccagtatggtgcagggaagccaaaagatcggacacccctgctctagaggtttatgaccaaaatactgtatttaaagctgctgggaataattcttttttgtgggtggtattcccccaagtggacgctctttgaattcattttcattttgatgtttagggaattggcttaacatttacatttgttttgtagttatgtaaaacatttatatggttctaaaatcaaatccacaaagcaagacatattcaaagaagtccaacttcttttccttctattttgtttttacctgtctctggtaggtagccatgtttataaatattaaagctataaatattttataaatattatagctttttttatttaaaaaataagcaactatgtatatatttgtattcccctcataggatgaatttaagagacaaattctcaaaataatgtgttttatatatagagagaaaggctaatgctttaagtttaaaaatcagtatttaaaagtttataagtaggctgggcatggtggctcacacctgtaatctcagcactttaggagtccaaggagggcggatcacctgaggtcagaagttccagaccagcctggccaacatggcaaaaccccatctctactacaaatacaaaaattagccgggcctggcagcaggtgcctgtaatcccagctactcaggaggctgaggtgggagaatcacttgaacccaggaggcggaggttacagtgagccgagatcctgccactgcactccagcctgggtgacagagtgagactctgtctcaaaaaataaaataaaataatataagtggtatgatcacaaccatctcaaacagcccccttcccccgacccaaaacccaaacaaaaacaaaaccctgccactgcctggaaaataagacctggccaggtgccatggctcacgcctgaaatcccagcactttgggaggccgaggtgggcaggtcattagagcccaaaagtttgagaccagcctgggcaacacggaaaaaccccgtctctacagaaaaaatgcaaaaaaaaaaaaaaggcagatgtggttgcatgtgcctatggttccagctacttggggggctgaggtgggcagattgcttgggcccaggaggttgaggttgcagcaagctgagattgcaccactgcactccagcctgggcaactgagcgagaccctgtctcaaaaaaaaaaaaataggaaagcaagaaggaaggaaggaaagaaggaaggaaggagggaaggggaagggaagagaggggaggagacgagactggctgtccagatggcattgctggtgatatttggatggtctgaccttgggtggtctccctgcctttttcttgtggcattttcagttattttcacagtcagcttccttcacatttcgaatgagatacagcccacctcaccgccgaaagaagacccctcatgggggtctggtgaatctgggtttgtcgttttcggatgctggggcagtgcgtctgggagggagcggggctgtggattcctggtgggtcaccgtggctgcttgaggctttggtccctgccgctgccatccaccctgagcatctgtggccctggagagcgaaagacttgtttcctctggtggctccgagcatatgtggcaaagctgtgtcttatttacctcccacatcatcatcctctcctaccctcatatgacatttctgcctgtccccttgacagtggagtagcagctgcatgttccgaacgtccccaccctgccattttcctaaaatgctcactaacgttatttgactctcaggatgtgtagacattttaaagctgtatttcaagataaggccatttcaaatgaactgtgtcttatgcacagggtaataattctctgttcctggcttttttatttttaatgaaaaatgcctgcaaggacctctcttgctgctgaatgccaggctgtggcaaaccttaaatttttccagctgctttaatcaataaagttatcaccagtcatttcccttgatcactgctgcttcccgagaccctgacctgcttcttgctgctgagttttcagtctgcactcagaatagatataactccccaaatccaattttcattttaacctttcctcagtggcctagaaatcacagattgctggtattatgctaatagattggaaattcaaacctcttagaggcaacctggccctttctaggattcagtaataaggcaaagaataacataccttaaaggttacttctagaaatatctaattctcacggtttaagcttctgaatcagtggatggttttatagcttcatatgagcacccaagtgatgtgaaggttttggcagttctccatcatcataagaagttctgtgggatgcaaatcctgcaggtttagtggagattgagactgttcaaaccagagcacttagttatatgtgacagccaagaaccctcgcctggaggggcccgtttcacaggtgaggagcctgaagcttagagatgaaacaccttgtcataggcgctttgcattcccaccatgaggttaagacaggatttctcaggctgggcgcagttgctcacacctgtaatcccagcactttgggaggccgaggtgggtggatcacgagcccaggagttcgagaccagcctgggtaacatggtgaaaccctgtctctacaaaaaaatacaaaaattaactgggcatggtggctggcacatgcctgtggtcccagctgctcaggaagctgacgcacgagattcgcttgaatctgggaggcaggggttgcagtgagccaagatggtaccactgtactctaggctggacaagagagtaagaccttgtctcaaaaaaaacaacaaaccccccccccaccccgcggtttctcaacctcgacacttggtgtttttggactgggtcattttgtggtgaggggatgtcctatgcattgtagggtgctaaacagcatcccactgtccgcccactacatgggaccacccccttcccaagctgtgaaaccaaaattgtctgtagacattgccagatgtgccctggggagaaccgcagcattaagcggtattaagagaacggttacggagaactctagtactgaacccaagattactttgccaatgaggagtgaagccaggcaccaaaccatcgtcttccagccccgtccagtgctctttgccatagcccaactctcagggaggaccagcggtgcagcagaatttcttagggaggtggggagggtagggaggatttcaggttggggggtagggaagatttcaggttggcgggtagggaagatttcaagtggggtgggtaaggaggatttcaggttggggggtagggaagatttcaagtggggtgggtaaggaggatttcaggttggggggggtagggaggatttcaggtgggggggtagggaggatttcaggtagggggtagggaggatttcaggtggagaggtagacaggatttcaggttggggggtagggaggatttcaggttggggggtagacaggatttcaggtgggggggtagggaggatttcaggtgggcgggtagacaggatttcaggtgaggggggtagggaggatttcaggtcggggggtagacaggatttcaggtgaggggggtagggaggatttcaggtgtaggggtagacaggatttcaggtgggggggtagggaggatttcaggtgcaggggtagacaggatttcaggtcggggggttagagaggatttcaggtgggagggtaggcaggatttcaggtcagggggatagacaggatttcaggtggggggatagggaagatttcaggtgtggagggtaggcaggatttcaggtcgggggggtagacaggatttcaggtgggggggtagggaggatttcaggtgtggagggtagacaggatttcaggtgggggggtagggaggatttcaggtgtggagggtagacaggatttcaggtggggggatagggagtatttcaggtggggagggtagggaggatttcaggtgtggagggtagacaggatttcaggtggggggatagggaggatttcaggtgtggagggtagacaggatttcaggtggggggatagggagtatttcaggtggggagggtagggaggatttcaggtgtggagggtagacaggatttcaggtggggggatagggagtatttcaggtgtggagggtagacaggatttcaggtgtggagggtagacaggatttcaggtggggggatagggagtatttcaggtggggagggtagacaggatttcaggtgtggagggtagacaggatttcaggtgggggggtagggaggatttcaggtgtggagggtagacaggatttcaggtggggggatagggagtatttcaggtggggggggtagggaggatttcaggtgtggagggtagacaggatttcaggtgggggggtagggaggatttcaggtgggggggtaggcaggatttcaggtcgggggggtagacaggatttcaggtggggagggtaggcatgagggctgcagtgatcttcatggctcgcaccctcagaactgcctgtgaaaaatgggggtgaggtttgcaggcttatccagaggcctggccatataaactcaaaggtgccctaccatttcgttccctgattctcagggcatcagtcctgactataggggtctggggacagtctgtacccctagggggaggctggtgagtggggagtacatgtctgtccacatgggggccactccggcccagttctttctgctgtggcctccctcccccatgggtgtttccactgaggcctccccacgaactctgttggctgagccccacctcccagccgtgggcattttctttggattgtcagtgtggggatgaccctgctcaactcctgactgggagcaggctggcctgctgggccgtgcccacttccagcactgaaagaatgggcccaggacgggggtcagccctcctgcagccctggtttgaattggaaactctgtccaccgatgcctggcacctggcacctagccctgcagctgtgggtctgaaactgacgggagttgcaggagcttccggccctggctttgtctttgtgatgtgtcctagtcataaggtgctctgagacctcatggcttagttttccttcagagttttttctcccttggaggcttttttttttttttaagtagattttattttcttctcaaaacacaagtatttaaaatatctgattatgaagcaactcatgctcattaaaggagctaagaaaaattcaggaaagtacaagaagaaaagaaaccactcatttcaccagcccagaataacacaaatcatgcttgatcttgccaattttttgtgtctatatatacatttttaacacaaaattgggataatcttgtatctgctgtttgaaatctgagttttcccccttaatatcctattggggacaatttttgttaacttatattttaggttcagggatacgtgtgcaggtttgtgatacaggtacattgtgtgtcttgggggtttggtgtgcagattattttgtcctccaggtcataagcctagtacctgttggggtagtttttcaatcctcaccctcctcccaccctccaccctcaggtaggccctggtatctgttgttgccctgtgtccatgtgtattcagtatttagcccccacttataagtgcaaacacacagtatttggttttctgttcctgcattagtttgcttaggataatggcctccagttccatccctgtagctgcaaacgacatgaccttgttcttttttaggggacagctgtctttgtgcttattgaagcactttaacgaagcagttttcacagctgcatactattccactgttcagactcccgtcatattcttgaccatttcctattgatggagatgaggctgcttccagtttcgctcttgtgcgtaaccctgatgaacacatcttgtatgtacatcctcttgtacatttctaattatttgctccaaatcctagtggtgtggctgggaggctgtgatgcatgttgcttatttctgtttcagaaaggtgtgtccgttcaccttcctgacctgctgcgtatacagatgcttgtttccccacatccttaccaacaccatgatttctgactttttttttttaaagtggtctttgagttttgctgttagtcttgttccttatgaaggtgtccgaccacagtggcaattactcagcattgcactgtctccaggtctctgtgggagcctgggttcctttggggcctggattcagggctcatcctagagtgagctgtcatctcagggcatctccctgggggatatgtgcaccccagagctgcagttacagacactgagctcactccaccttcaccacccagccctgctgcttcccgccctaatcctcctggcagagcccctggataaggaaaatatttgtgaaccacggaagctctttggtgctggaattttgcactccaaagcatcgccgcctgttagatgatgtttccctccagcacctaggacactgaagaggagaccagggcaggcaggcagatgcgtaagagggaggattgactgctgtagcacccgacccaggacacctgcctctgggactgtggcgcctccatccggctctctggatcctgggttctggggggtccgacctttcatttttttctccgcctcacaccccaccatgtcgtgtctgaaaggaagcgaagcccagccctggcaggtggagtatttttatttcccctgacagcgcacctcctgacctctatcttcttgccagtgattttttaaatcctaaatgatttggcaataattgctcctccttgcgtgattattgcccttcaccgatagtaaatctgggaatcccctggggtcctgagcgcactttggtatgcggagcccacaagctggcctggacaggcatcactgctccaggcagctgtgcacccagccggccctggcgtcccggcccccagcctccgcctccctcgccgacagcttcccggggctctgcctggaggcagcctcgctttatcccgcagaacctccacgctgttcctgcatgagaactcttcctccaagagaccacgttcctctggtcctgtctccgtgggccacatccacaaatgttccagcccaggaagaaccaagtctgtattctgggagggaaacctgtgtgctgtctggttttgtatgtgggaggagcatgcacacagtttcattttccccggaagcatggaggtgtaggatgacatgtaatatttggaagacccattgcatttccaaggaaccttctagcaggatggccctggagtctctggcagcagtggacatggtcctgaattggagtgctgtgaatgttcactgctgacctcacggtttgaagacaattccttgagaagggcagaggggacccgaatacgggggctctggccggccctgctgccagatgccagcagccgtgggggcttgcccggccagccctggcttttcccaaccctcagagtgccccttgtgcatgcagcagacactggtgctggtcccattcccgggagcacgcggtgccactggctgtgtcttgcctggccaggtgttggtttgatagactcgaaaacctcatttggatttggcaggattttccctaacatcagtcattctggaaaaaacactttgaatttttaccatatctgggtatttttaccatatctgggtacttgccactagctctatttacttcacgtttcttaaaattgattcattttattacttaaataaatgtattttaaaaggaacttttgatgactactataaatggaaaaccagaatctctcacttaccataatagattaatctaaaaataaagaccacatgattacattaaaatgtatgtccttgctctgcctggagtcaaatagtatgtcacccgtgtgcatgacacactctgggaagcacaggggtgggtggaggaaagatcagagaaaatccgtggaaagtatgaagtagagagcaccacaccaggaagacgtggttttatttcagtacctcatgtctcgcggtggcttgcggctaccagtaactggcagaattctcaacattgtggccctcagccacctcctccgagctctctctcagcaccaccatccgccgtggcttctctgagggaggcccctctggcctctgcttgactatgatacatgtcgagtccatgccgagtggcagaaaagctccgttttcagctgaaactacctccctggcctcagggggcctcattggctctgtctttgtactttctcaatggctcctgatgattccttggttatctgaaggcctgtttgggagacggttcccaggacagttgcttcaggcttatatgtgtgtgctttctggaattcacagcatggcgtgccctggtgagtggtggggagatgggtagtgaacacgtgtggtagcccctgctgggcgtgtcccacctgtcctccatgtcctacaacctggttggccccttttgcttgtcagagcaaagctcagaacctcacctcctctgggaggcctttcctgaccacccacaagcccagtaggtcaggaggtcaggcctcacagcctcctgtgtgttatcccaggccctgatgatgagactgtggaattacctgattaatgtctgtctttagcacttgtcgtgagctccgtaagtgctgggactgcatgtgtctgattcacactgtgtgcccactgcctggcctggcactggcctgcgaaggcctagggcaaaggtatcaagtaaccagggcaagggtgcctgttgcaggtcgggggcctctctgatgtggtgagatagggaatttcctcaacgaaacatttcctcatgtttctgtttcctttgtaacatgtttaggccgggcgcggtggctcacacctgtaattccagcactttgggaggctgaggcaggtggatgacttggtcaggagatcaagaccatcttggttaacacggtgaaaccccgtctctactaaaaatacaaaacaaacagcggggcatggtggcagccgcctgtaatcccagctactcaggaggctgaggcaggagaatggcgtgaacctgggaggcggagcttgcagtgagccgagatcgcgccactgcactccagcctgggtgacagagcgggactccgtctcaaaaaaaaaaaaaaaaaaaaaaagtttaggtaatgtattatgtcctggccctgtgctgggtgcttcactaagatgatttcctttaaacgccacacctgttatacccattttacagatggaggtggaggctggcccaaggtcacacagccagcaaacaggagagctgggatctccaccccactgctctagctcagcgtgagacaggagtgagtctgtgcatctgctggccacatcgggcccgccccctctttctgtggtccccttcccccagatggagagcaaattccacctggacccgtccttgcaggcagagtccaaatctatgggacacacactcagtaagactcccctggcttgggcatgcttcatagtcatcgtttcattttgtcttgattttggtttgtgtatttatcggttagcccctcttagcatctgaattccagtgagaagacatgtagtttgtttgtttgtttgtttgtttgtttgttttaagacagagttttgctcttctcgcccaggctggagtgcaatggttgcaatcttggctcattctcctgcctcagcctcccaagtagctgggattacaggcatccgccaccatgcctggctaattttttgtattttaatagagacgggtttcaccatgttgcccaggctggtctggaactcctgggctcaagtgatctgcctccctcggcctcccacagtgctggaattacaggcatgagtcactgcgcccagcttttaatcagattttggagtaggggagtgagaggagctggttggtggtggtttttttttctttaaaattattattactttttttttctttaaaattattattacttttttttttttttttttttgagaccgagtctcactccatcgcccatgctggagttcagtggcacaatctcagctcactgcaacctccacctcccaggttcaagcaattcgtgtgcctcagcctcccgagtatctgggattacaggtgcatgccgggctaatttgtatatttttagtgaagactggtttcactatgttggccaggctggtctcgaactcctgacctcaagtgatccacccgcctcagcctcccaaagtgctgggattataggtgtgtgctaccactcccagctgttttttctttaaattacatatatttatttatattaaaaaaaaaaaaagagcatgagtccatttaagcaataacacatgttaatgtggcaaaaggagacccacaaatgactgacgtttcagccacactggcgaggactgtatgactccctccactctatgtaggtgaccaatgggaagtcttgtttgcgcctcataagtgtgtccagacacagccagccgtgccgtaatgcagagcactcagctgctcaagacacatttgctgagcgtcaaccaagtgccagttgtcaacccagattccttgtcctgaaggagctcctacttctggaagggtgggatgagcagagtccattatgctgcactatgacacgggtggcaccagggtgtgatcccagagtgctttgggagagccacacaacccagcctgggggcagaggaaaggtggtggtcaccagagctgagtcctgaaggcctggggggaattagccagcagaggagggaggtgagcaggcagaaggtcagcacgtgcccacaaggtaattttctggtgttgatgtgtatttccagctattgtcattttcccttcgcccaaaggacttcttctacatttcttgtagggtagatctcttggtgatgaattatttccgcttcggatgtctgaaatatctttatttcatcttcattttggaaagatatttttgctgggtacagaattctagatgggcagttttttcttttactgcttaaaagacggcactccacagtcttctcacttgcattgtttccaacaagaaatctaacgtcttaatcttcgtttctctgtacataacatgtctcttttgtctgactgttttataagattttctccttgtcactggctttgagcaatttgattatgatgtgccttaatacagttttctttgtgtttcttgtgtttggtgttcattgggatcttggatctgtggatttattatttttatcaagtttggaaaagtttcagtcactatttcttcaaatatatttatgtcttctctcatctcactttttttttttttaatctaatttagagacagggtcttgctctgtcgctcaggctggagtgcagtggcacaaacacagctcactgcagtctcaaactcccgggctcaagtgatcctcccacctcagtctcccaagtagctgggactacaggcgtgcgccaccacatctggctaattttttaaatttttatagagacagggtcttgcggtgttgcctaggctggccttggactcctgggctcaagtgatcctcccacctcagccttccacagtgctaggatgataggtgtgagccactgtgccccagctcatctcactttgaggaactctaattgcgtgtacatcaggccgcttgaagttgtgccatagctcactgatgctctgttcatttttgaaaataatttttctgcctctgtttcattttgggcagtttctattgccatgtctccaggttcattcatcttttcctctgcggtatctcttctggcattaatcccacccagtgtattttgatccctgacattgtagttttcatctctagaagcttggtttggattttttcttttatcttccatttctctacttttggaacacatgaaataccattacaagggctgactgaatgctctcgtctgctcattctcacctctctgtcagttctggctcagtttggataaactcatctttctcctccttctgcatgatactttccttctttgcacgtctgatcattttttattgggtgccagacgtgatcaattttaccttctttttgggtgctggatatttttgtgtgcccataaagaatttcgaactttgttgtgggatgcagttaaattacttgaaaacagtttgatccttccagatcttgctgttaagatttgggggcagcaccagagcagggttgccctgggtgaatcattcctcatagtgaagccagcggcttctgagatcgcactcaatgccctgtgcatcgtgagtgagctttcccagcctggctggtggggacataacgcagtcctgcgtgagacacaggcaccgttttccctagttatttggtgtgattctttcccaggctcagggagtttcctccctcacgtgtgctggcagtggtctgctgagtacttgaggggaccctccacgatctccacagctctttctccatgcagccttctcctctctgattccctgtcctgtggactctgctcctgggtctccccagaatcctagctttgtctccccagttcagggatcctactgggctctacctgggtttcccttggtattagtcagcccagtctgtcatacaaaacaccacagactgtgtggattcaacagcagaaactttttttctcactgttctggaggcttgaagcctgagatcagggtgccagcaagtccggtttctggtgagggctctcttcccagcttgtagatggccgccttcttgcagtgtcctcccatggcctctcctctgtgcttgcatggagagggcactccagtgcctcttcctctggtaaggacagcagtcccatcagatcagggccccctctgacctcattcgcccttaaagaattacctccttacaggccctgtctccaaatacagtcacgctgcgggctagtgaatttgtgggggacacacttgagttcacagcacccctcctgtgtccacagtctggaagcatcgaaggcagtaggctgggggcagtcacaggagccacctcatttgtttcctgcgtctcagaagtcattgtccttcgttgcttgatgtccggtgtcctgaaagctgttggttcataatttggttttctggttttttcaggtgagagagtttatcccagaggctagtttttgaaatgatacccaggctgtgagcatttcctctgtgtgtgtgtgaattttggtttgtatatattattttgtttttaaggcaataccttcaccattgaaagcaaaacctatataaagcaaaacttacaaagatttgccagagatttgcttcactttcatggaatcaagggcaaataaccaggttacagagtctttagggtcaggtgaaatttagcctgtgttccagcagaggccagacagcgttcagcatccccgcacgtccttggggcgccaaatcactttgacgtctgctgattgatttcaaattgcacagatatatactgttcaaagctgtggcctacgggggcagtgtgagatatattcaaggtgggttgacttttaatcaatacgatgacaatattatcttgtttaatttgtatgatggtggttgtaaacatcaaatcaagccatttattatgtcaaaaaaagatgaaggagcccgggaataaaactctcctgacatcacttctgagcgtatttcactgccgtgacaggccgtcatgattggggacgatatcgtgggcgacgtcggcggtgcccagcggtgtggaatgagagcgctgcaggtgcgcaccgggaagttcaggtcagtgccagctggagtcatttattcaccttccttccaggggatgaccacattctcattctgttttgttcttcaaaataaaggggatattctttccaaatcaaagagcagtatgtgggcattcactatcttgtatgtaatggacctctaagaacagggctgagtggtcttttatagcagacagtgataaagtagagtggcttttgatacagggtctgggttttggaatggcgtgcagtgcagagagaaataagcaaaggcactatccatcctggcggcggcccaccagggagttgggccgaatttgtgctgctgtccctttggcaatttgatcagaccctgcactacggcagttacagctgtgggcactcagccccttggacagcctccctctccttttgttcactttctccactctgtaagacacagagagcctggagacgacagagggttgctcaggcatgccctggagcagaacctccatctcaagaagaaggttgtgttttatttgctggcaaaagtctgcctggtctggagcagctgtcaggggttgggagctcccaggcatgtggagggccctgtggtacccaagctccagctcgcctggtcatcgagaggatcttggacatcagagtgttgccttgccttatgctagatggtttcgattgtggccattcagagaaagtacatctttgcagatgctggggagacttggttgaaacatggttacctggaggtacttggatttggggtgggggcagttacatttgtcctgagagatctgcttaggcaggaccagagaagacagatcagagggcccgaccgtcgctctgaagtctctcctgcgggttgggagctgtggctgagtgcgaggtgagtgaggaaggctcagcgcacctgggtccagggtcaggaagttggtcccttccagctacctcccagaccctcccaggcttcccccgacgtgtatgacatatgggccttctttctttcttgaagttgggttttgtggctccccttggttaggcctggcctaagggagtgagggagaccccactcacaagccacaggaacgtttttttccaagagaccagccaggggtcccccagtccccaatcctgcctttcctgcaaaggtcgcagagcctggtcttgctgctgctcccaggcgaggggctctccgctgacagcggacctcggggccctatagttgatgccgggtgctgcctggcgtcagccgtcaggagcccagcccggcgccccatgcgtctcagggcacacctgtgacccgtgagcacaagtgacacctccctgcttgggagcacagcggtgtggctcggcaggaggtggaaagggagaaccgtactgtgttgtgtactgggcttcttccagttccttggaggagaaacatgtctgtcctgaatgccacctcagttggggtctttctggccagcccaggccaggtgcccctataaactgagaatgggcctctgaagaaggccccccacagcccacgaatgcaggtgggcacgagggaggctgtgcccaccctacgccagcaagggttggtgcttttcagattccggttacctgcatgctatttaaagaagagtacgaggtgggcatcccccatgacactgtctcccggagagagagaaactctgtttttttgtttttgtttttgtttttttgagacagagtctccctctgtcgcccaggctggagtacagaggtgcgatcgatctcagctcactgcaacctccgcctcccaggctcaagtgattctcctgcctcagcctcccgagtagctgggactacaggtgtgcaccaccacgcctggctagtttttgtatttttagtggagacggggtttcaccatgttggccaggctggtctcgaactcctgacctcaggcgaaccacccgcctcttcctccggaagtgctgggattatacgcgtgagccaccgcgcccggccccagagagagaaactccatcaacagtttgccgaatccttccacactgccttctctgcatagataaacagactggtaatattttggttttttctttttataaaaatgggatgatattgttttgcagcctcctttttccttgaacactgttttatggcctctttctacaagtgtcttcataatgatttttttggtaatttttaaaatttcagtagtttttggagaacaggtggtgtttggttacatgcataagttctttagtggtgatttctgagattttggtgcacccatcacccgagcagtatacactgtacccagtgtgtagtcttttatttctcacctacctcccacccttcccggcaagcccccaaagtccattgtattatttttatgcctttgcgtcctcataacttagctcccacttataagtgagaacatacagtgtttggttttccagtcctgagttacctccattccttgaggtctccaactccatctaggtttgctgttaatgccattatttcgttcctttttatggctaagtagtattccatggtgtatatgtaccacattttttttctttgtttctttctttttttttctttgagatagagtcttgctctgtcacccaggctggagtgcagtggcgcagtctcggctcactgcaagctccgcctcccgggttcacgccattctcctgcctcagcctcccaagtagctgggactacaggcgcccaccaccacgcccggctaattttttggtatttttagtagagacggcgtttcaccatgttagccaggatggtctcgatctcctgaccccgtgatctgcccacctcggcctcccaaagtgctaggattacaggtgtgagccaccgcgcccggcctctttcttttttttttaacttttaagttcaggggtacatgtgcaggttcattacataggtgaacatgtatcatgggggtttattgtacagattatttcatcactcagatattaaacctagtacccattagttatttttcctgatcctctccctcctcccctcttcaccctccaacaggccccagtgtgtgtgttatcctgtgtatccatgtgttcagatgctgtaggaaaggaatcagtgtagtgccgggcacacagcaagccctcagcaaatggccagggtggggagcacgtgcggccactactgtccatatccatccgtatccatgcatatccatccatatccaccaagctccagacatggagtcacctgcctccattgaagaggatgggacttagcccatttgttcctaacgagatttaaaatgtcagaccttttgatttgtttgtaaggatgcaaatctgcctttgttaacatgcaggacaaagggagaagagtgttagcttggctaaggtagggacccagtcgctgggggaggccacatgggcatcaaaggaggtggggctctgcgtgtgtaggtgtgccccagttaaagggatgggaggtctcccagccattggtgactctctggagctgcactgtcagacacagtagcggcgagccgcagggggtgacttgtagctcgcccacagtgagacgtgcaggaagtgtaaaatacacactggatttcagagactgggtggggagaaaggattgtgaaagagctcatgagtatttttttatatcggctgcatgttgaaatgctgatatttcgtgttaatttcacccatttatttaaatttttgttaacgtggctactagaaaaggttcgctggcttctgcaggagtgttggtggccccaggtggcagctgccctcctcctgcactgtccccttctccctccagatggtactcttggtacacagatacactgaaatgctggaggggcgtggggtcctggatgagtggctgatggggcctcgctctctggagggctgttttgggactggaattgcctgcgtggtgctccctatggatgtgtggccagcctggggccagcacacagcctctggagtcagccgggcacctgccgctgggccggcatcccttccttccaggaaatacccccagccaggctctatggagcagcacctcgcccttccagggccacccccagccctctggcacctcagcacggccccattctgcacagcggtgagccccccaggggcagcagctgtgtctcctctgcagctgaggcatgtcgtcgcaaccctgtgctgagcctctcctctcctgcaagtggcccaaagaggcctcaacaggggccaatgaccactggatgggtcagctgggcatcagaaggccttccaggctctgtcctctgttggtggccttggcggaaatgggagaatgaagggggaggaggggtggccttgtcctgggcccaggtggcagagagccctgcagtgagtaactgcgctcacacttggtttgaggccagggcagcatggggaggccgtccaggctggggcagctggcgggtgggggcagcggtcagtcctgccagtcactggcaccaggaagggggagaagccagagggatgactgaggcctcccactggtcctgctgtgggacgtgccctcagccaaggtcttctagtacggagcacgcacacgtgcacgcacttacacgtacacacacacacacacacaattgtttctgaggcagctgtcaggagtctgagaggccgagaggtggctgaggagtgggattcggccgctgactggcagtgagatctccttgtcaccttagatgtatccatttctcttgttttcattataaaatggcccaaagagagtgaagcctcggggttgggagagattgcaggtggcttagctctggagggaaagttttgcagggcctgctccccaggaaagcatcatccccgggcaggggtgtctggagcttggcccaacagggctgcccaagagccctggacagggaagcacaaagctttcttttcatacctgctccctgtggaaatcctgcccagccagggggcggccctcacctggctggcaggtaaaggccttctgggtgttccctgcctgccctgttcccaggactcctggcgcattggacatggctgctcccccagactcctcgaggtcccatccagccacagcgttcctgctgcccaggccctggacaacagtgtctcctccgtggggggtcctgtgccatgggtggcaaatcctcatgatgccatgagtcctgcagccccagagggtgctgctgccctgccgtgagaggctttttcagatgggacagctaggaccttggccaaggccacctggcaaggttttacagaagctggactggaacctggccgcccccagtcccctgggcgggtgcttttcctgcacttttccctggtagaatgtcctgcccttggggccacattttgcagcagtcacagggcctggcctcactccagggctccatgtttggatgcgaggcccagtgggtaagtgcactgctgcccacgcccccccccaagcactgtctgctcctccctgcttgcctgcctgtcaaggcagccctcatcttccttggaggatggggctgggctgggagcctgcgccctcccattctgacaaatgagtagagggaagggacgttttgcccagttccaaggtgccctctctgtcctcagtggagaaggaagagccgctggcacatctgagccacagacccttcctgcctcttatatccccaccaacctgtgttcctgtggacatgccagaaaccaggccgtgtggcctctcaccaccccatcactctgttcgctgttccacgccacaccctgcagccaccacccagtcaaaggcgccactgcctgggaagcccctgcgctagtcctggtgctgctgtgtaaataaagccgcgatgcggagctcgcctctggtcttctcttattgtttacccaaggctggcagatgttttataagccccgaacgttcttgacaaacagtttgcccttcggagagggaaagtttcctggaccgtgattcccgacatcctgcaaggtcccttctagctgtggcctgggtgctgaaggggtttccccccagtggggtggccagccgatctaggattccagccgccttgcacaaagctggaagacgaggggctgcagggtgcatggctgtggagctggctgcgtcgggagggagagtgcccccacgcctggcctttgaccttggaagcggctgccgtcaaagcagcagcttgtcctgggtcttcccagacttcgcagtgacggatttcagagtgtttcctgttacgagaaggctgtggattcgctttggaacatgacagatttttcttctgtgctacgtggagtgtgagggaaggaagtgaaactggtgttaatttttcagcagtcacatgtcaaagtgagtggctagcaagcaggggggtccaggctgtggtggccctggtcagccttccaggagtcaggaccctcctgctgccctcctgtgtaaacagaccagccagggcaatccgagccagccccggtggagagaaagggccagtgctgggcttgggagctcaccccaagttcctcgggtactcatcctggcagtgcagggaagggcaccgggaacaggcctgtggaaaaatccactgtgcaatgagtccgtgaatcccagacatcctctcagcagccctctggtcctgcccgggatagaggctgtggcttctggtgtaggtgggcacttctgggctcagaggggtcatttagctcacctgaggtcacacggagtgggacccaccccaatttaagcctgtacacttttttcttttgtctcttttggtaacagctttattgagaaatcactcccacgctgtataactcagtggttttcatacattcacagagctgtgcagtcgtcaccacaattttataacatttcatcaccccaaaaagaagcctcaaatcgtttagctattattagcaaagaccccccacattccacccagccccagacaatcactaatctactttatgtcatactttctttcttttgttttcatttttttttttttttttttgagacagagtctcactctgacagccaggctggagtgcagtagcatgatcttggctcactacaacctccgcctcccaggttcaagcgattctcctgcctcagcctcccaagtagctgggattatagccacgcaccaccatgcccaactaatttatgtatttttagtagagatggggtttcaccacgttggccaaactggtctcaaactcctgacctcaaatgatccccccgccttgacctcccaaagtgctgggattacaggcatgagccaccgtgtctggccttatgtcatactttcatttgaaaaatttagaaaaattaaattggcccaggagtttgagaccagcctgggcaacatagcgagacctcatttctattaaaaatcaaaattagccaggtgtggtgacacccacctgtggtcccagctactcgggaggctgaggcaggaggatctcttaaacccaggaggtccacgaggctgcagtgagctgtgatcataccactgcacttcagcctgggtgacagagcaagaccttgtctcaaaaagaaatttttttaaattgtggtaaaatatatataacataaaatatgccattaaacaattgtgatgtgaagtgaataaaatttgaatacacagcataatgaataacaaagcaaacactctaaggtcaagaattaggaggctatcagctccccagaagacctagtccctgattgacatgcccagtcctgcagaggcggccccgccttgccgtgggcacagtggccgcggtgactgggcctgctttcttctcccacatggctggcttccctccaacatggcgctggctcttccttctctgacctttatccaagtggaatcgcacactgtaccgttgagctgtggcttgttcatcgtgtcctctgtggctccaacacccctctctgcccgtccctcagagggaacatctgggtgggtcccagtttggcccttctgcactggctgccaggaatgttctggtttttgtctcctggacacatgggcgtgagtccttctggggcggatctgctgatagatggcagtgctgggtcatggaggagcatatgttcaacttgaccagatgaggccagacgggtttatgcccccaccacggggggaccctgttgctccccgccccgaccatcacgagctgttctgggagggaggcccatgttcttcccagtttacggtcctgggaggtttctggacattgtcagcatgtggcagtcccggacgctgggcctcctgagagagtggggaggagacccgaggcggaggcgagtgtgtgaaaggaggctggtggggtccacatggctcagcaggtgaacatggggtttccaggggcagacaccccatcgtggcccccatggctttggttggggcagcatcagcttcctcctctgctgggtttcctgccttctgttggctgctggggcaggggagacaggattgggaacagtcaccctctctggtactgaccctcattagcattcttggttcctgagcaaggctgcttcatgtccagggcaagaggggaaagatgttaaaacctgaacccccctgctgggcttggtgccgcctgtgggaaaaccggtgggctgagggctggggggctctgagctgaggaagggggtcccaggtggaggccgggaggtggctgcagagtgaggccacaaggcctgggggttggcccagaaggtaggacccctgtaggcagcctcccaaccccaggaatttgcctcttgggaacgtgcaggtccctcgagggtcctggaaggcgctggagtggtgggacagggattgagggagcgtcagcagggccctctcttctccctagagccgctcaacacgtgttgcaaggcacgtgctctggacctggtgctcacacgtgctcttctcccaagacactccctgaagcgcgttccccaggagctggaagggggataacgcaggtatgcctcatggcggggccagtgctcatgcttacacacactcagcctcagctcgtctacaccctgcaacagcccagagaagccacccgccttcttacccctaccatttagatttgcaaatggaagctcagagaggtgaagtaacttgcccaaggccacacagcctaccagtgtcagaatcgggattcgaacccacctctgcctgactccaaggcctgtgcccctgaacattctcaagccaccccccaattagccaagtgttgctggagctctgagcaggggccgggcctcacaaaacaatagtagccagtgtgggggctcacaggactggtcagctcccgccctcccccgctttggccccctccacacacacacgacctgctgctgagctggacataagcaggacctggctctgggggcttctgacctagggcaggccctgaagttggtcattagaccccacccacccacctgagagcctggcggagatgtgacaggtgacagccccagaagtcccatcgttgctgcctttgtggttaaagtccgctgaacccaagcgctctcttcccctccagtgtgtggtggggaggtggggaggggacccaggcagatctgggaagccgtggccaggccgcagcaagcaggggaagaaggggcccgcagtgaacttgcagcaggagctgtggccaccgtcctagccaggccggccacctgcccaaaatgttctctaaccttaacatgaacctgggccacttgggctctgctggatgcccccagggctgccagagcctgcccgccacagagcccctctgagacctggagtctcacctgagccctctcgctgcccacagggctggcctctgcctttccgctgctgctctgcggctcggggacacggccagggctggtggcgcttacagcccaggggcaggggagggcacatcccccacagcattcaccattgctgctgtgttctgatgcatcagggaatctgcatttttgaccctttgattgctacatcttttccagcctggaaaagtgaagaaggaaggaaagggggctcagaggcccctgactcctgtccttgcaggcacagctggacgcagttcttattttcaaccatcttgcagcagtggttttatttgtgcacaggttcctctgtgtcatgggtgggtcccaggatgtgaacccggtgtgctcctctagctccactgtcctcaggttggggacagccagggacaaggccccctactccagctccaaacgtagttccaggctggggtgccctttgcccaggcccagcctggtagccccgggtgctctccctgacttttcatgagcccgggggctgaaaccagagcagcagggagacagaaaagcccagccccaccctccagagggggagtccagctgcccggagaccccaagagcactgccagaatctgggtatgagacccagtcccctgccgcgtgctaaccatgtaaccttggacgtgatctctttgtgcttttttttttttgtttttttctttttgagatgcggtcttgttctgtttcctaggtgggagtgcagtggcaccatcatggcccactgcagcctggaactcctgggcacaagtgattctcccgcctcagcctcccaaatagctgggaaacaggtttatgccaccacgcccaactaatttttaaattttttataaagatggagtctccctgtgttgcccagcctcctgggctcaagtgatctccccgccttggcctcccaaagtgctgggattacccggcttgagcatgatctttttgccttgcttggctctgggtttcctcatgtgtcaagtggggctgagccccagctgtgtgggctgaacaggggagggttaagctcggcccctagagtgagggcccgccatggtggtggctcccgtatggcatatttccctaacggttcccatttggtctgtcctgctagaccaggctggtgggacgtacactgactctggggttctgtccaccccgtgggtgtggtccaccacatggtcatggtggctttctagggtagacttgaccttccccactgcctttatttatttatttattattttatttttttttgaaacggagtcttgctctgttgcccaggctggagtgcaatggtgcgatcttggctcattgcaacctccgcctcccgggttcaagggattctcctgcctcagccttccaagtagctgggaatacagatgtctgccaccacacccggctaatttttgtatttccactagagacggggtttcgccatgttggccaggctggtcttgaactcctgacctcaggtgatctgcccacctcagcctcctaaagtgctgggattagaggcgtgagccacagtgcctggccttccccactgcctttaaaatctctatggtccccactgcccacgggaggaggcccaaccctgtcctctgttagtcccctggtccccgtagatatttaccaagcacctactatggccaggcgctgttgaggatgtgggggatcgagtgaatgtggcaggtgtcccctgccctctagggctgttcttccttctagggagggaggttcaagcccctctcctgatgcccagctggcctcccagcgtcagggatctctgctctgttggtcccctggagtggccctggggccaccacataacacttttgtaagaataagagttattttttatggcacaatcgcccctgccctgggtttgtgaatttgggggattctttttttttttttttttttttttgagacagagtcttgctctgtcgcccaggctggagtgcagtggtgtgatctcggctcactgtaagctccgcctcccgggttcatgccattctcctgcctcagcctcctgaatagctgggactacaggcacccaccactaccatgcccagctaatttttttgtatttttagtagagacggggtttcactgtgttagccaggatggtctcaatctcctgacctcgtgatctgcccacctcggcctcccaaagtgctgggattacaggtgttgggggattcttaaggaaaaccacctgaaagtgcggggttattaaaaacagaaaccaacccatgcacccaccactcacgagcagcccacacagctcccacctgaccagggctcccccttctcatgggtgagtgaaagttgctgaaaataggcctcctggtgaggaacctcccagccagccctgtcagtggcactgaggctgctctccgactgtggcatcccccatgtctgtcctcattactgagcaaaaatttgtgcagaggagtgctctacactttccaagggtttaatccaggagctgagggccaggggctccatgactgtagactcaacatcctgggccacagccatccgtgagggggaggacgaggggccacgccctgcactctgtcccagcatcccctctccctggagccatgcagagatggcctcatttcatcccacactcacatgcgggtcctagacaccagctcatgcacatacacacacacacacacgcacacacacacacacacacatgcgcacatgcacccacgcactctctttgcctgtgggagggcaggatcccagctgccccagcggggaaggggtgtggggaatcagccctgcagatgcggtgtgaggggcagacatggcatgctggtctttggcagtgtggtcccaagtgggggcggctggagaggtgccttgccacagggcccaggccacccgcatgcatcccatgaggccgtccaagcccgtctgccctgcatcagagaggacaccccaatgcggggagggaggaacctggtgaagccaggagcggtgggcaggggccagcaaggatccccaggcccccagggcagtgtgcatccggccttcttgcatgcccacctggcatcctgcctgccgcctcctgcctcccgccccacccctcctgcgtcccagcctggtggacctctcagggttcactctcatttcctcctccccacgccacctgctcgggccacaagagggcgccttgctgccagggatgggacaggccgggcctgctggagccagggccgatgcacgcacagctacatacactcacccgggcccacgtgtgctcacgaggggcccccatacccacacgatcccgcatccacatgtgcgcacgccaggccccacaggttctcaggcccaggccacacatccacaggtgcccactctcatgctggcctcatagtgcatgcacacacacacacacacacacatatacatacactcacgcccagacccccccacgccccaggccacacatgtgggcctgctcacaccccactcattccctcccagatgccgcaccacccccatgccctgtgtgccctctgcctctcggggccctggggccccagctccaagaaccacgggcttgctttagccaggcttccacaagcctgcccattcctcaggacactgaccctctcctctgccacccttcacgggtgcagacgatgagcatggagaacaccacagcgcacagggccgagggccaccatcagagtctcctgcagccctggattccctgggcctgaagcaggcagagcggccaaggtagcctcatcagcctcaccagcccgtccttcttgtctccctggcaccttgtcagagagaggcctaagaacacgctctgggcattgggggcctcccagtgttccctgcgagtttggagaggccaggtccctgggatgaggacacgcccacccgccaagctcccctcctgccagtcccacctggagcctttatgcatgctgtctgcgcccttcacctgtcccaccacctcttctttggcctgcctggatcctgccatatcctcaaggccttccctggtgatggaattccagagtcctcccaattgcaagggcctgagggatccgctgccctccaaccccacaccccgtctcaaggtcatgtgctaatcccgtgcaagctggggtgtgggctggctgccatgtcaagctcgtttctgttgtacccaaaacacagtctcacctccagaagaattacctggcactccctggagttcccgcagccttctcattttcaaataatttttcagatttccagaatagaaagaaattccatacacccttctcccagagacagaccccattcaagctttgccaatcattccatgaactcctctagagaggggaagacccagtccggggccaggcagctctctctggtctctctggactccgtcctggagcacttccctgtcctcgcctcagttctcacagattgccagttttgaagattacgagacagtcattttgtgtggtgttttctcatgatacaacccaagttacgcgtttggggctagcattgcttagaagtggtgctgtgcttgttctcataggcatgtaatgttggtttgcccaaatattgctgatgttaaccttgacctcttgtttaatggcaaccacataatgtgtttttcccctttgtgattgatacgtatttgtggggagatgctttgaggtgatgcgatgtcccactttcatctgccagttttagtgtcccttagtatttcttgtttgaatgaatgatttctatgatggtcgccaaataactccatcattcttccttgtatttactcctggtgttttactttaaggaaagatgttctcttctttccactgattgatgtatgccagtgtgggctcgtggcttcctatgtaattcagtgggttatcgtctgttaaccgtcatcactgggatattcagatggtccccgacgcaggcactggcagccccttcaggctggccctgtgacctttcggcacatcctcaccgttctttgagcccttccttgcattttggcccaaaaagatgtttcaggttcatttgttcagtctttgcttcagccctggaatcggccatttctccaaggagccccagttccttccagtggagggcactgtttagaatctcagcccagggccccaggtgtgcttgtgttgtctctgggcattgctgctcaggccctggcggtggacagaggtaggaaagatgcgcatggtatgcaggtgtgacacacacatgcgtccatgcttaccctacccacctggacctgcccaaaagcccgagctcacagcagtgcctccgattccagtccagcagcacagggttccttctcacctcatgcctttacacgttcatgccttccttccacagcagggagaagcctggcttcctcattctctctccatctgcttatcgctctatcccatgtagagccaagtccctgaccttgcctgtggtggacactctgcgtttgttaaactgaataacaacaatcctccctattgggagaaaccttttcagcttcccaggccatttctgcatttgtggttctcttccaagcctcttgggtaggcatagaaagtcttctctgttttccagggaagctgcagactcacccagcatcacccagctggtaagggtgtagcaggacagtgccagcatgtctgtcccaactgtccctatggcccctatggaagattagctatgtggtggcaaagtgtcccgaggaaggggcattctgggatgttcaggtgctcgactgggctgggacttgtactttggaaatgagaagaagcccaggctcaaatctttgccccactgcttgctggcaggaagaccactgagcctcagttttctcatctgtaaaatggacttattttggacttacttcccaggtatcctcagcacctttattacaggagctccattaatacatggctgcaggaggtagttcagggaagcaatgggagtggaatgctgggtgcatcacggcctggggttgtcagcctggcctctgcaggcatctgagatattcctgagggcagattcagccaggccaacacttctggatagaaccacagggccataaactgagaccattgagggagactgcttggcttggaaaactcgcccagggaccatgtgctctgatttgcaaaatgcaccccccagagcggcttcctgccttcactttgtgcagagttgggggcggcaggggcgtggggggttggatggaccatgtcacccaaaagtttgtgtcctcggatggggaggggagagcgtctgcccaagcacagcctggaggcttcccttacttccgatgaccttgtggcagtcagtgtcacccggacagagtgtggcacgccttggggaccagcccctcccagaaggataggcgcttgattggaaacgttgacttttcatttaaataagtaaaggtcaaggcctactgcatggcgaggaggagatggctcttccctgcctctgtcctcccttacccccgtgtgagtggacaaaccccccgtcctcacccaggtggcccgcttctgccacccgcactatatccaagacacagcccagctttgcaggcacttgccgtgtgctccgcagtgtgcagggtgatgagatgaacaagaccatgtggcctgaagggtcccacgctgcagagggccccagcccagggccagaccccaagtgtgtgcctggagtgactcaggggtgcgcgaggaggactcagtgggatatggaatgcaggggctgaggcatagggagtgacacaggggctcagggctttcccatgagtcgaggctcattgggttggcagggaccacatctgccctggtcgatgccctgcccatgcaggctctaacggcagagtttggggattggggcgggggatgcagggggcctggggtggggagcttgggggcagtgggccaggcaaagcagagccctttgctgtgttggaaacccctcagaggccctaggcgtgataagtgagtgtgacgcaggagagtctctctgcatgggccacccacaattgcagagaagacgccctgcatgtcataggcttggcggcccatgccgggaatttggcatggccgtctttcctccggtgctggggagctcagcagctggaggcagatgctggattgtctttctctaccgcagcagggcaggtagcttgtcttttagtttgttttgttagtctcctgtatctgtgactctgcagagagccaacggcaggaagagggcagcaccggcacgtcggaggccgaggacggcttagacgggaggtccggaggctctcagcctgaccagccctggcctagggccggggaaaggcctgggctttggggtcaagggcaggggatgagatctcagacccacgacctaaccattgacctgcctgggccacttcacccctgcatgcttccttccctgtctgtaaaagcggatcacgtgaggggccttgcaggaagctctgaggcccagtgaggcccccgggagacaggcgagaccgctgtgagcgcccgtccttcccgcccggtgcctggcaggttcctatgcgctctcggggcttcgggctggggccctgctgcggcgaggggggtgctccccaggctggcgctgtcggtggtgtggctttggctgacacgaggtggagaggatcttgttgacctgaccgtataaagtagcagtgaggccttacaagtagttctaggcctggaaaggaaagggaaagaaagagcaatggaatctggtattttctcaggtgtcctggactccatctgaaagatttcgccatgggaaacattccttcctgggtcctcggcgcctattgttacagcacgcaggcacccgggctgtggcctaggggtgaaacctctctcgattgtgtggccataggtggttacttaacttctctgtgcctcagcgttgccactgtgtgtggcgatagcaacatgtcttcttcctaaggttgttgggaaaacactgatcgcaacagtgacagatgcaggacccactccaccagaaattgttccatgagcttgtttacccaccagacgcctgtatgagagagaactgacatcgtcctcactttgcagagaggttaagtaacttgcctaaggtcacacagcctttgaaccctgggagtcgaactccgtcatctatgctctgaaccactctgccacatgtggtggttactgtcagttccatttgtttccacacagctttaagttagtcctgtggtttgcttttattttatttttaagacatggtcttgctctgtcacccaggctggagtgcagtggtgcaatcatagctcactgcagcctcgacttctgatgagattctcgcatctcagcctcccaagtagccgggactataggcacatgccacaatgcctggctaattaaaaaaacattttttttttttttgtagagacaaagctgttgctatgttgcccaagctggtcttaaactcctggcctcaagtgattctcccacatcgggatcccaaagtgctggaattagcttggcgtgagccgccatgcctggcctagtctggtgggtgtttaaaccttgctggcctttaggggtgcatgctgtgaagacctgtgggccagaggccaggtatcaggaggagacactcaggcctgttgaatcagctcagtgccacagggctgcaagagcagctgcttcaggctcctcaggccgtgggcccctgagcaccagttctgctctgctccctcaggggaactggggagatcaaggtggggcccctggacctcccctaattcagccagagaagctctcatctcttccggggtcccaggcaggattcccctgggctggggtgggaggttctgctgctttaaaaccactggaaaggcttgagaaccagtgatcttctgccctgttacagacgcggaagccggggtggagcaggcctgtaaggtgggggctggggccggcactgggtccccgggcttttccacccctgccgcgtgtgcgtgcagactggccctgcggtccatgggcttgggcctgccttttggcttgctcccgagtattttgcccagaggccttgtggctttcagggatgctgtctggggctggaagtcagtccttgttttgtcctggcagtagtcagcaggagggagaagaaggggttaacctgtctggaaccaggaaagaggaagcggtagtgttcccgcatgcagtcccaaatagactcctgctcctgctccgaggccaccccagccaggctggatggaagctccccggctgggccattgttccggcccctctccctccaccctgagaaagcccccagcccggtgggtcagggcaggacatggacaggccaaggctttgggctccagggaggccaagctgctggggcccagagaccctgctgtgtatcccagagccagagaagaacctccctgagggctctgtgagccagagggctgggggatgtcaagagacaggcagggcagggctgcaaggttagagtgaggggaggggtacctggtgccattttggaagggacccctgaaggcaggaagcaggacagaccccccgccattggcagaagacctctggaatcctgagatacttaaattccctgcggcagctccaagcctagggaaccagacagatcggggaggattggctagaacagtgcatcctggtgggtcgtgttggaagctctctgaggtccctctgctgctgagagatgaaggaatggagccctggctctgctgtgggatgccaggctgcccaggctccccgacctctccagcaacaaaaatcataaacacagcatatgtaatatataaataataaaagtaacagccatcttttcagaataatctagcacttagaatgtgctagggaacatacaagcacttttctccttatttacagtaagccttaaggtaaatttcatcatctccagattttaagtaaagaatttgagaatcagagacattcacagcaacctggtgcacccggagcctggctgaccccagcaccgctgctggcggccccacctcactcgcccagtctccctgcttccccagccaccgtccagctacctcgagagatcctgggagcatggtgattgtggggtgcatgggggcccgtgagctgttgggggtgtcagggttctgcccgtgagatcctccttgttgccagacatgaggacctggactggcagctgtgggtggcctcatgaatcagggatcagagatagcgggcagcaggcgggcccagcccggagcaagctgtgccattggcgatgcggggaggctggccccatcgaaggctggtgggactggtggagactcctgtccactgctcagcactaggcctgcagcagacaccatgagccccaaacttcccaaagcccttccccagtcccacaagatggtgtctgcggaccgtgctcgtgagagatggcagccaggcagtccccacagggcacccattttcagctgcccccgcttctcagacaaggaaactgaggccagaaagccaggtggcccaggagctggcttccccatttcctgctcctgtgggccccactgcagtgcccatgggccgggctgatattacccgagacttcggagctctcacgggtgcgagtaatttaggctgcatggacacaagctgctggcttgagtcgccccgttatgaatgtgtgtgggtctgtgcccctttcatgtgctgccacagggcccacgagtgtgctgaaagggaaggacacggccaaggggccatggtggacaggagaccttcttgggggttcggtggtgtccttgaccccactctgactgagcactgccccaaggcactgccattccaggcccccttccctgagcctcccaccccaggcccacccacctgctgggtcctcccacctgcggggcccgccatgcggggtcaccatgcgagtctcaccatgcagggtcaccacacgagtctcaccatgcagggtcaccacgcgagtctcaccatgcagggtcaccatgcggggtcaccatgtggggtcaccatgcggggctcaccatgtggggcttcaggagcttgctgagcaccctccccacccacggtcactctccctggggtctgtaagcctccctgggcctgagcagctcccagccttgctgctgcctttccacttcctggcagtgaggtctcctgggtgccttctctcagccctttgggatgttttttgtgaggaagggaggctttgatgctgtggagcatctgtagtgcccactccagtggcttcacaggagcagcaggctgtttgttctgagctgttccaccttgtgcctgccagaggggagatagtggacaggcctccctccccccaagtggtggggtggaccccctgcccgctgtggccccatacctgggggccacacaccactgccctgggccgtgcagctgctatgaagagtgtgctgctgagaccctggaagagacggaggatgaaattgtgttgccagatagtccatttgttgttctgagactcgcatgcctgggagaatcctgggaattaactagctccttctctcccatcccattttacagaaaagtgagacccaaggtggtttctgacttgcccagaggtcataactgcttggacagtcatggtcctcagagcccacgtttgctgaccagtgcaggctctcacagccactcagctcctgcagccgtggcgtggcagaggagggaagcacttcctgggatttatgctgcctccctgacatttcaaggcccttcatttctctaaatattggaggagttgaattatttttagttgagcctcaagggatcagagaataagcttgcagcaacgttggcagatgggcttcttctagcagagagtggttattcggggcctcttattgagagaatcgggtgatttgaggaaatctggggtgtcctgaggcataccagaggacccccaagtttttcctgtggctcgtctgccatcaggaaaccaaaatgactcccctcgtcctgagctctccagggtgtggacctggaatgcttaaggggaggcaatggcatatctttaagatgagcacagctccggagccactcgagcacccaaggccacgtcctgctcagggcacttcgggcctcagtttccttatctttaaaatggacagagttggccgggtgaggtggccctgcctgtaatcccagcactttgggaggccaaggctggcagattgcttgagcccaggagtttgaagccagcctgggcaacatggcgaaaccccatctctactacaagtacaaaaatttggccgggcatggtggctcatgcttgtaatcccagcactttgggaggccaaggagagcggatcacttgaggccagaagctcgagaccgcctctactaaaaatacaaaaattagccaggcgtggtggctcacgcctgtaatctcagctactcgggtggctgaggcaggagaatcacttgaacctgggaagtagaggttgcagtgagctgagatcgtgccactgcactctagcctgggcgacagagcaaaaccctgtctcaaaaaaaaaaaaaaaaattagtcaggcatggtggcacacacctgtagtcccagctactcaggaggctgaggtgggaggattgtttgagcccagaaggttgaggctgcattgagctgagattgcaccactgcactccagcctgggcgacagagcgagaccctgtctcaaaaaaataaaatagacataataagagtacctaccacctacggctggggagaccagaatgagatatcctgccaaaagcactcaccgcacttcctggcacacagcaagggttcagcagttacccgcttctgctcattttcttggtgttctcatcagtatgattatttagggaaacttgggtccccagataaccgtggggaggggagggtttacctgcaggtgccctggcccagccgttcatgcagcgccgtgctgtttctgtgtctgtgcgcttcggtggagatgctgtgggtgggtgggcaggtgtgccttgtgctgtggcctcccgagacaaggagggctcccacctaagcagggtcctgcagcccaggcacatagccctgccctggccctccaggtccacacggctgtgggttcccaccagggggcggcagggacttgcggccggggacccagcctggtttctcccgctttgcttcgtggccaggctagggccaggggggctgcgcaggatggggccttttcaccactgcctggagccgctcgcccaccaaccccactgacggctctcagtttccctttccccgagcgcccttcaccctgaggcacagcacagcctcgtgctcctggccccactggcctgctcccttaagctgagttttgcctttgcagtttgagtgacatttttgctggggatccggggctgctcggggtggcctcgcacacccctgcactttggctgcctggaacgtggcttggggttcacggtgctccatggtttgactcacaggcagggttccagcagcagcagagagaaagagcatcttctccagccggccctacagaggccccgggaccccaaaggctgcactgaggtggccaccaaaaccagggggcagagtcctcctaagttctggccctagatctaggctccagatctcccgggagttggatccagaggaacctgggctcacttctttagcaggttctggacacacgatgcctttaggggctcaagaaaatgtttaatttattttaaaattagaaggaaaatatctctggaacatttagggccaaagaaaatgttttaatgttttttctcactttagaaataataattcaaaaatccattaaattatttaacagcttttttaatggaggaaggggccccccaaatcacaaagtggccctgggccctgggatggccggaggagagcctgccatacccacgcagtgtgcctgagtcctggagtgcgatgtattctgagccacccagaatggtgagtcaccaagaggcagcttggaggtgggccgctgcccctgcacactgtgcttgggggacacagccgacacgaccagcctgcagtaccaggatagacaatttgggctggagccaaacttgatcagagggaggctgactttatcgagggctgctttgtggcgggcgttcattgtggaaagagcccaggaaggagctctctgccttgcaagaacattgcctgtggctcaaaatggccacatgggatgcagttcctgaggtggcagaagagccagcctctgctagccccagacctaacggagttgcggctcatggccaccctgaggaattccacctgggcgtttggtgtccctagcatatctcgaatggcaggctgaggctcgaaagtctcatgcctgtctgcaggacccccgcgtgagcctgggaccacccgtggggacagtgtgtgtctaggcaaatgccttgggcactcgagggggcactgaggccctggagggcttctgtgggtgggagttcccatgacgtcatccctcagtacaagctacgagggcttcttagaacacgctggacactggggagggctctaatggtatttgcacaaatttgcaatgttggagaccagagtggagtgggctgggcgggccaggccccggcccagatggggtgacctttccttcacccctacttccccactgcaagggtgctgcctccccagctcctacctggggagatgctgacatctggtcattcgcagagtgccctgtgcccacatgctgtccctgtccagacatgaaacggacagcaggagggggctttgaggggtctctcctgagacacctctccagctgaggctcctggagttggaagcccctgcagactcggtggctgcctcaccaaaggctccatctgcatttgcccccatgaccttcccactgtgcctgggaccgcagttagagctgaccagcacctggggcagtctggggtctggggctggcgttcgggccagcatggaacacagatgccttcagtggctctggtgggcacggggcttgcacagatcggactgtgaccccaggctgtgggactcagccaccaagcgccttcacttatttactgaccttgaagttatccagcacttatgtgtttacagatacctgcacaacagccagagaggtacgaatacatctccacctacaggtgagggcacagagaggttaggacccacctgaggggatgcagccagcaggtgggacttgggccctggcagtctgtttccagcctgtgtgctcaggtccagggtctccctgggactggagagggcgctgggggaatggagccgcctcctgcatcagagcttctcctgctccagttcagcctgcagctctcctgcatccccaggtggggaccagagagaggggcaggctggtaccagcctgggggagggggcagttaccagaagaccttggtccccatcccagccctgtgcaccctggggcccagccaggctggaggcccatttttcccagaagcccacctctctgcctccttccaggggctcaccccgccctgctgcctcttcttgatcgcctccttgcccctactctcccctctgccctctcgcctcccctcacgttcatggggttttgtggacgcgcctgcctgcctttcatcagtggtgtccagccgtctccctgaccgaggctgagggtcctgcacatctaggccccgtcacggtcgttctccccggtccctgcctgcccatggctcttgccacagtggggatgcagcagctctgggttgagtgtctgtcgttgcccctgcactgcgtgtgccctgtgagtgggggctgctgtgccacacctcactgccacccatgcccatctcagggtgtgggcccagcgggtcctcaggctgtacctgtcagggggctggatacctggacagggccttgtccgagggttgactgggagagaaaatgcccccgttccagctcgggcagtacaagccttcatcctcccagactccacctccctggctgctccttcctgtatggcccccacaggggttggcagggcgcactccccagagggacaggagtttgtggccaacctgagggtagacactgcctgtcctccagacccctagacacccccggtcggcccaggtgcggggtctgcccgcatcccacagccatctttccagcgaggacagtgcaggcgcaggtggctgtaccgtggctgcggtgatgtgctgactgggaacggcagaggtgccctgggaaggcggaggtctgggagccccacaagggctgagccttggggcctcaaaacagggagtcttctctgggctcagggcctttctggagatgggacttctaggttgccagggccactagccgtgaggagttcagctgcccatggtggcggcggctgggctgtatcttgcacttctcagctgtgtggaggggtccgtggggcctgtctgggcccagcacagcagcgcacagaaaagccactttatatatttgggattctattaatccttctagtttgtacattttttatggcaccttcaatttttttcttttaaaaattaatatatttttttttctgataatataagaaatgcatgccttctttggaaaatacagaaaatcacaaagaaaataatccacaatcccaccttccaaaaggaaccacagttagcattttgttcagcctgttttttaaaaaacaaacaaacaaaaaatgcatactaaaagcaacgatttataaactgtggttgtagagttaagctcatacccagagttgccggcatctcaccagttcctctcctgggacagtgattgtgccttcccagagctgccgcaccctggcctcgcagccaagcctggtgacagcagtggggtgaccctgcgaggcccctcggatggctgatgctgagagcccagcagagctggagggggtaggggcagcctccccaggactgatctgacagacgggtatgtgcctcacccggcatcacccaccggggaggcctccgtccgcccccatgcagtcatgctgggtccccccatctcgtgtcttctggggaatggagcggaagacctcccctctctggaaccaggggtgggagggactgtgctccccagaatgaatattccttggctgtgggtgagcctgccagcccagagtccccaggggtcaggagcagactggcaggggccatggcaacgactgggacacctggggagccaggtgtccaggcaggctccagtgtccactcccaacaagtatggggcattgagatcctgggtggatcacaggggagcaggcgtgctcaagctgacacagcccaagctgtctttattcaccaccagacccgaatccacctctgggccaacagtctcaccctgcaggaggcctggcacctgtgtttgtattttatcaccatgaggttgtgtgggctgctgagagcgtgtgcagagctctgggcacaagcctcggctctgtggccggctgagtggccgggcctcggtgttctcgtctctgaagtggggagaaggctgcccccgtcacgggacctcacagtgttagatgagattgcagatgcgatgaggtgggggcccagcaggcctgctcagggcgtggctgtccctcctggtgcagacaccatcacgtggaaggcgatcacatcgagtgttctggccactgtggcgcgagtgcatatgtgcgcagggctgtgcatgggcggcctgggttgggcttcctttctcggcttgtctgggaggacggtggctcccagtgggtgtctccctgtctctgccccactctgaggatgtgggtgctttgagctgagtgaaggaggaacttctctaggagagagctctgcctgccacctccctggtgcccccgcccccagagcagagctgtccttacagggccacagcctctgctggccccgaagcccctttgcagtgaaggggggctcctgtgtgcggctccctccagatggacaaaaaccaggtttggatgccggggcctcggctgagtccctcgcttctctaagcattcctttcctcgtctggaaagtgggggtgtagtattgtgcgaacctcccaggccatcccaggatgaactgagatcatgcccataacatagacttccgcctggtccctgctcagagctccccgaatggtcattgccacatctaaacaaatttttctttcagctgggggtgctggcggcccctgcagcggtgcccacggcagcccatgcacccaggcaggaagctgctttgtgcaggagggtctttgtgcaggggcagtgtgggcgagcctggcagcctcctgagcggcaggactatgcaggcgccttattgagctgtcagcggctggcagctgctcccaggtagcaggaagaagggccgagctccacgtgggcatgaaaggcccagcgggtgtgtcagggggcggggtggggtggaagtgttagtgcgaatgtgagtgtgtgtgcacgcttgcaggataaagatgagtttttaaaatgtgtctcctgtggtttttgatttttttaatctttcccaaaatcaatacaaacaaaccacaggcataatttgggtctgtaaaggccgacgctgtcattctgctgcaagagggagggaagttcagttggggggaaaatgcagcgcttttgctgtcattaagtccaatggtggctggcgacagtcacggcgctggtggagctcagagcagaggtgggaggggtggtattgaccaggcgtgtgtgtttccggtgtgtgatgtgagaacccagggctcgctgggatgctgtcctccctccctccctccctctgccaagctggtgggaaggcccttgccaaagcgcacaagaccccttcacacagcaggggcacaagctctttgaggcagagtcgcctgcaggtggggtggaaggggtgcgccccagacccaagaatcgcccgcctctccaagaccatccctggctgctggtgagcagggtaggagggttgttggcacctgctgtggccggggccgtgccaggtctgtacacattgtgctctttgctgggtggcagccaccacgtattctcaagggcctgtgctaggcctctggcgggccctgggttgttcccttccttatgagctcccattattaactaaagaagacactgaatgatctcatgtggttgtatgtttttttgtttgtttgtttgtttttttgagacggagtctcactctgtcgcccaggctggagtgcagtggcgcgatctcggctcactgcaagctctgcctcctgggttcacaccattctcctgcctcaccctcccgagtagctgggactacaggtgcctgccaccacgcccggctaattttttgtatttttgtatttttagtagagatggggtttcaccatgttagccaggatggtcttgatctcctgacctcatgatccgcccgcctcagcctcccaaagtgctggaattacaggcgtgagccaccgcgcccgcctcatgcggttgtatcttggtgggtaaggcaggtctttctatgacccacctgccagcctcatcatccgtgctccccacctcaccatgcatgcttcggttgctgtttgtccacaggcgtacttactttgttttatatcagtttttagatacaaaaatagtacaggtagaattcggtattctacattttcagggaatatcacatcacacacacgctgctctttcactatggttttcatgttttctgcacctctcccgctcttaacccgcctcccacccagatttagctctgttaacccttcaggcttctttttctgcacacacacacgcacacgcgcgcacacacacaggaggttgtcctgtttggtttttagaaatggaattgtcctgttcctctttgcaccttgctcatttcacttcatggtgcgtcccagataccactttctaagtcaccggcagaagcaggaccttgtgcttcctgatggctgtgagctgtcgtggcggcacacctgtcctcggtgtggagttccagttcattcctgcagtcccctgttaacagatgtttagactgtttcccttttttccccttttcattacaaacaaaaaaaattgctttcttaaacttattttcatgtttttaaactttctaatttctcataaatatttcaactttagattctgtgagtgagtctattagtgtcaggctttgcagaggaaaggaaagttctagaagagtctgcagctcgttctcccaccccctgcccccagtgtccacccacagaggtgtgagcatgcaaatagggtgagcttctgtctcccgtctcttgggtgtcttttccacctggggcctccctggggccatgctgggggagtgaaaggcccctccctggaagcccgaggcccctggcctggatgctgtagcttgcctgaaagcggaggaattctggctgcctggtggaggtcggggctggccctgcaccgccaggagaagcagtctgagggagggctgctcaggctggacccagccctgaccagcggggccatcgggcgtcctgggccctggcaggatgtcgttccagtgatacagcacttccttgcttctaaactgctgagtggtcagtgtcggttatcagctgtccacatatattgcataatctcagatgctggcttgtaacagtgagtggaggtgggtggccacactgtccctttagaataatccacatggccctgtccaggcagggcagcctctgggctcccgcccaccgcctgatgcccctgtgcctggtgagcctgggccggggtgtgtttgctgtggatgggtgtgttccgagttctccggtcagcaagctccctttgtctctaggggagttcctgggaggtaaaggggagccttttcaagccacaagatcacccagaaaacctacgtaagcactaaagttcagaaaaatccagccagccttggagctggggagactgcttcccttggggcccggccactccagagccatttccgtgatggtaaaatgagtgggggccccatgctgcctctgcctcctgtgaacgccatcctctggttcttcaccttcaggctcccgcatgagctgggtggttggtgttaactcctctcttctctctttctacccggaaccccctgcccagagctccagggagctccaccatagccagtagagggagggctctgtttacctccttccaagttcccaattttgctctactgatttttgtctgcggtgcataatcaatcagcctggaccccagagaggccttctgtcgaggtgggtgggtctcagaacggcaggctgctccccctcctacctcggggcccccactgtgcacctgcagctgaggcatgttttctggggttcctggctttggcctgcacggctgggtgggaggagggcatgggaggtgatgctgctcactgagcagggcctgctttgaccacctcgggatcaagagtcctgttagatgcccaggtagagacccttgctgggcgggcaggtggatcttcgagaatggagctccgagggacaggttggctgatctcagtgaaccctgaggcttccccaaggccatacagcttgtctggcagagcctcagcaggagcccgggtccccggacaccgaggctagctctttctgctgtggccttctcacagaccaaggtgggatcgcagccttggtagccttgaagtctccctaacctggcaagacagtggagaagggggacagccagcgggacattccactgtagaataaatacatgcatggcaaaacacttgacatctattaacttctaagtggcaagagtgattcttgtggttagacctgaatgggaacttgtaagtctaaagtgaaaatctaattagatttttcccacaaaacaattttccgcaacgcattgtggacataaaggtttgatgaatgtatagccaggcacagtggctcacatctgtattcccaacactttgggaggccaaggcaggaggattgcttgagcacaggatttgagaccagcctgggcaacatagtgagactctgtctctataaaaaaataaattagcagggcatgacggtgtacacctgtagccccagctactcgggaggctgaggcaggaggatcacttgagctcaggagttcgaggttgcaccatgattacacctgtgagtagccatgcactccagcctggacaacacagcaagaccctgtctcaaaaaaaaaaaaaagatttggccaatgaattttatcagctaaactgggatatttaagagaaaggaaggaactcctaatttctgagccctggttctgaaaaagctttcttttttctttcttcactttagtcttgttagcaaaaccttaacagttcatagaagaaatcattttttacttttttccccttaatctgagcacaacatctggggttgccatggtggtccattggtggtgatttgcaggacgggaccttacatctggggaaggggctgccaggctgggcctgcctctggccctgtgggcatggccggggtgggcatggccgggaaaggcatggcctccagaatcagaggcctgggttgaatcctggctgagtgcctagtggggcactttgggacaaatgaccacctttctgagccttgcttttctcatctgtaaatgggggtggcaatgcctacttagttgaatgttaaataaaatgaagtcgtgtctgtgaagcacctggcatggtaatcggtggccgtgaggatgacgctggcctcgcagggactgggtggcacaggtgtcctgaccttggcatgcagggtggatgggccaggcttccagccagtgctggatctcagaggcccaggggttagagaactaagggcctccgagccaggctcctcgttgcaaatggacttctctcctttgcgtgctgtgaactgggcgtgaacacctcctgtgatggggagctcactccttgccgagggagcctggtaagctgccggcacagtcatcctcataccctctctcctgacctgtgtcttatggcctctgcccccaggcagctgcggggcagggggctggggtgacccccgtcttggttgttgagcccttccactagctggagggtgactgtccccccttctcccccgacacaaggcacagcctttcttgtggctgtcaggagagagggcctgtcctcctttgcgcccacgctgcccctgcgccttgtggcactgcattcaaagtgagtgcgcctgcttttgtttcttcctaggacttctgaaaacgtgtgggtgggggagggtgtggagggttcgtgcaccgggtggtgtggctgcagtggcgtgggaggcggccccagaggggcagaggcgcagtgtgtttatgtgcacagggccgttcccttcctgtccctcatgtgaacaccagtgtacaaatgtgtgcacacaggcgtgtcccccgtgccttttccctaccttggctgatcgtggggaagatagactcacttcccctctccaggcggcgattccggaaaggaggctctggaatgccagctgggggcagggaagccagggcagccaggagggacctagcaggcccacagaggtctgggacagctgagccctcctgcccacggccctgccatccctgtgtgtccccaaggtaacgtccaagctctgcagcagggaccagccctgggtcccacagaggaggctggtccaggtggtggactagagctccgcttgtgccagcctaggtgcagaggcccggcccagcccttcctaaccttgccgtcctgggccagctgttcggtctctgcgtgcctgtttctacacaacccatctgtaaaatggggccatgggagccaccacctcccccaggcctgtcgccatcactggcacctccaccagcattagcaccagtgtctccatgaagttggggttcctggggagatggctccccccagcctcgcctcctccctgcctcagagactgcgcagaaggagggcagctgggctgatgagcaactcgcctggggccccagagaggcccgatcccatcccgctggggcacgccccaggtccaagcctgtctgggcacccccagggctctggactcacctccacccctccctctgcatccttggtggtgacaccatcagcaagtttggcacccccggccctcacactgaccccagcaccccttccccaggctctggtggactccttgctcacgctgcctgctctgcagggtgggggcgggggggcagagcctgccagcccctcccacacttccctcaccagatcacaggaccctcggggtggaggctggtgcgtggggaggtaagggtcaggtggtgggaggccatcctcagcaggggtcccagagtgggagacccagagctttaggaccccaccatgcggaggggccagggtccctgggatggggagaggcctcagccagggtgagcagaagagctgcagcccctgagacccgcgggcttggccggccccccgggaagaagacccacagctgggagggcagttcatgcagggcaccctcccctccacctgccggccttggggagcaccaggcaaggctccctggggagcagggctgccacctctgacctcgctccagcctgacctcaccacggaggcgcacgcaggatgtccgcaggcccccgggtggcagcttcctacagtgcttttccaccagggaccgtgctgaggcccagggccctgagaccctcaggcccatcacagcctccccactgagcacaggcacgtccatcccctccccttctccacctgtcacctgtctgtcttccaggcttcgtgggacttcccagtgccccattcctgcttgtcagaagaggggctgggagaatggcagggcctggcactccaggctgcccctgccctcctgcgctcttgccctccagcctttccccaccctggaagtgagttcatgatgttaatggcagcagcagccatggtgcaccaggcactctgctaagcactttatgtacattcttaaattaccggatccccattacggaaacggagtcttaggttgaaaaactacttgaccaaggtcatcccagctgtaagtggcagagcaggccctgaatccaggcaacccaggctgatcaccaccctgccaccacccacccctctctcacatacaggctctaggcctcctgtctatactggaatcccccacagcagatccacatggagctgtctaaagaagcacctgcccctcccccagacaaggcaagaaagccatctctacctggagggagagcagtgaggggcatcattaatgggctgttgggtgtcctgatttctttgagagaagacgagctgagcaggcacagctcttaatcctccagccactgccccccaggctggggcctgccagcccccgcccctgtagtcatttctaaatcgggtctagatggactggacgcgtggctgccagagaccatttgaaccccctacctccaaattccccaaggtccccgcctgcaaaggaccagccccagcatgaggccctgaaagtggcaacatttcaatagcctatcctggacaatcaggacgatccctttactaatttatatgctatacgtttggggtttaattggagcgtaattgtaatccatatgctgttaaggtaattacacttataaacctaatataatccatagatcaatgggtttggagctaattaaggcaaccgtaattaacatttaccaaaaaccttgcaattactggaatatcctttaagctggccttccgagctgataatgagcgccgctcagcgctccgcggcctcctagcgtgtctttattctgcacaagggggccttctggggacctcgatgttgggagggcagtcagtgcctgcttttagcacccagggactctgatcagggacccagctgatgagtggcagcaccatgggaagccaggtccctgtgacttggccatccccagaacacggctgattttctggctcaatagactcagcctgacaaaggggaacttggagaaagagaacaagaaatccatatgctgagctgggacagaacccaagtggggttctcatgtggggagcatatggggctttcctcctgcccaccccctgcacctgcagccaggatgcacctgagctcggactgccctgaaaccccaggaaaatcccaacagcggcaccatagggccaggattacagccattctttttttttttttttttttttttttttgagacggagtctcgctctgtcgcccaggctggagtgccgtggcacaatctcagctcactgcaagctccgcctcccgggttcacgccattctcctgcctcagcctcccgagtagctgggactacaggtgcccgccaccacgcctggctaattttttgtattttttagtagagacagggtttcaccgtgttagccaggatggtctcgatctcctgaccttgtgatccgcccgcctcggcctcccaaagtgccgggattacaggcgtgagccaccacgcccggcctacagccattcttgaatgttgtatgactcccggtgatattgtcaccttgggagctgcacagagacctcccccgggccaggcccctcctctgtctgcagaaggaggtaaggggcccaccacatctgtcttaccacaggctaagctgttggcatctgttcttttcctgctccaggagggacagagcccccctgttgtccttgcggcaccatgctctgggaactgggcgctcctgtggacagctccatgtgagtcttcttcgagagactccactgcagatagaagaaggcctcgagcctgtagttgcggggcggtggtcagcctgggctgcctggattcagctcctgctctgacatttacagctgggacgacctgggccaggtagaggtttttcaacctaagactcagtttattatgtatttattcatttattcattttatttatttattgacagggtcttgctctgtcacctaggctggagtgcagtggtgcaatcatggctcactgcagccttgaccttctggactcaagtgatcctcccacctccgcctcctgggtaggatgcatgcctgaggtgggactactggcatgcaccaccacaccggctagtttttaaaattcttgcagagacagggtctccctgtgtggcccaggctggtcttgaactgggctcaagtgatcctcctgccttggccttccaaaatactgggattacaggcatgagccactacacccggcctggactcagtttctataatgggatatggcagtttaataatgtgcatgcagtgcttagcctagtgcccggtgcagagccactgcttcattaatgctgctgctgctgtccttgtcatctctatcattgacagccctagacgagctgaaggggtgggcccaggtgggaggggccaggtgggcggggccaggtgggctgtctgcacctcgcttactcctgggtgggctgttagcttggcgggtcccagggctcacttttgccccatcatcatttctgtacactttttccatctctgggccttagggcctttccaaagactttgcaactctggcagatatttctagacagaattaggttctttaacgaaggaatgaggcaaatgtggacaggagattgttcataattgcggctgtcatttattgagcacctgctgtgtgctcttagcctctgggctaaacactgcacagacataattcactgattgccaacagcagctttatgcggctggcattttagtctcactttagggtgaggaaactgaggctcagagaggctgaatcactggtttgagtacgtccagcgagagggcagctgggccaggatttgaagccagccattctcaacaccactgtgctctctgcctcccgagtggaggccctgacccctttgctctcttcctgggtgggccagtggggatgggtgaggggtgagtgtgtcaatgtttccctcagcccagtagtggagaacaggcagggtgggcgaactcctggctggaccacagccacaggcctgcaggaggcacccttgccagggcgagtgagcactgtagtctgggagaccctagagtgagatgggggctctacaaggcacagctcctccctggaggaagggaggaagggagggtccctgccttacagggcctggccctccccacttgtccaaagcccggctgggtcctggtgtgtcagcgctttgcagtacaccctgtgctacccacccaacctgtgtccccgtctgatctccctggaccctcccacagcctgggaagggtcccccagctgtgaggtcagcatgggggaccttgctctgcagagggcacctgtagggctggccttattggagtccctcctttctaggcccacagtcctgcgctgcctggtgtgcggggcctgaatgtcattgtttcatatattttatctgattttctagttgctttaaggtactttgtctatcttgactgttaggctctttatttttcaaaaaaaaattcaatataatagtttgcattttttcttattgataataaaaccactgacattattgagctcttgttctgggctcagttctgccccgagctgtttgtacatgttaccttgctgaacctgcacccaagtcctcaggccatattcccccttacagatgaatgaagtcactggcccgaggtcacacagctgggacgtagtgcaaccaggctgggccctagctggttgaccccagtgcccactatttatttggtgcttacatgcactggctcattttgtctctacagccttgcaaaggccacagttatgagatggcagaggtggtattcaaattcaggcccctaaacttgtgtctgtgttccctcttgaaaacttcagtaaactgaagaagtgaaaggcagagggtaaaccaccgaccagcccaccatccagaggtgacggtgacctctgatgccgctgggtgtccaccttccaaactgtgtgcacaaatgtgtcctctgtgttctagtccacaggtgaggtcaggagcacaggctgttttgggacatctcttcccagtgcccagttccagaacacccttccaaaccaccgtgcattctccggggccatcgttttaatggctgcaccctgctcccgcgtgtggacgcatcctaaacagtcccttagtattatggttagatgctccatgtgtttccaattcttcattattgtaaacccaactgcattgctcatccttgtagcatagctttgcacttattttggatttttgctttaagataacttctcacacatggaattgctgggtcaaagggtatgcaaaattctaaggtgtttggtacttctgcagaattctccctccagacatcaagttgctctcccatctgcactgtggataattctgcaactctcgacaccctcaccaacaaataacaccgaggactagcagtgtcatttttaaaacgcgcctccatcaatgggaaaagaatgggatcttctttgattgataatgagactaaaggctttttctgtcttcctcagtcgctgatatttgtttcttctataaattgcatattcatatcctttctcagtcttttttgtatgttttttaaacgaaggctcttctttaatgggaaatctgcatttcatcaaagatggagcgcagagtctgtggttcatttattctctggagaagatgcttcttttttgttctctaaccaatcagagaccagcctgaagatgctagcaaattaatttcaggcgcacgagacaggcggtcggtgctcatgaggatcctggctgaggaaatcacattttagtcccaactcctcgaagtgttgaggccgcctggagtccacgcggaccagggttcaaatccccactcggccacttcctagcagcatgactttgggatgtccctcagccatcagagacttcactttctgggctgtaccatgaggtgttggtgtgcagtttaaaggaagtttggacggctgtggtgtggatagttctgagtgctcagtaggcagacctggttttgagctgatagagaaggcccacgcgaacgggcagagctgggcctcgccagggcctggcactcagtagtgctcaccaaatgcctgttgcacaagggatggtgcccaggtaacctgggtgagctacaaaccagagccgctggacgagttccaaagggaactcgggcgcactagccccctttgtttgtgtttggagtgggagtcaccgtatagctttatttgattactttttacccaaatccccatatcctcaggaattcaaggacaaggatacataacaaaatgatttttgtctcagagtaaatcacagtccacttggaaaatctccatcctagaggagggtgagggtgcaggtcttggggtgaggctggggatgaagcctcccatgactttgtggttaccctgctggtgggctcactccctgcagggccattggtggagtcacatgatgccaggcaaggctggccaagcagggtacagagcacactgggggagggatggctgcacaggcgtggaccgtgggggatccagggtagggatcccacctgggggtcttgggctgagtggtggagcgtgttgcctgaacacatgagcccgtggacatctagtgagcttagggcatggcaggggtggggtgcgttgcctgcagcctggggcggcctcggctccttcatgtcagcgcgtcctgacaccgtgacactgcgcatggtcacatggagcctgtcctcttgtatctgcttcatctctggctttcctgtccatctgcctggtgctttggagggtgtaccaggctgtgagggagaagcagccacgtggctccgttttcttgtgctgcagctgggccagcagatctaggggaaaggccacttcctagtggcctttctggtgggagggagtcatagtgatgagtctggaagctgagccctggcttgggagcagctggaaaggctgcctgtggcctccctgagtggacgtcctctagcagttgttcagcctccctgtccccagccagccaccacctagttggcactcccagtgggccccacgagccgcgtgttgctatgcacagcccttacgagaatcccactttccagatgagggcgacaggaggaggaagcatcactcacttgcccaaggtcccaccggcaaggggctctgagtctggacgtggccctctgagctgctctgtccccgcttggcgttggagcgtctcagcctctcccaagagtgtgtgcccttgtgtcgctggttcagaagccagaaggcttccaggggcagacctaggcagaagccctgagtgggcatcctggtcagccctgtgggggttgggggccagtgggcaggggcactcaccatgctacccaaccccccatggcacccccaatgtggaacgcacgggctcaggactcacttttattttggtagagcttggagtccccatttccatgttttgtttttctttacagtcccagtgtcaagcttagtaggacacagatgtctcagcaaacaaaactaggagccatccgagcaggcccctgcggccatatgcattcccatgcgtagcgaaaccaggccctcttgccaagcactctttgggaggatatttggaaaaaatgtcaaggcattcatttttctctcgaccttttctgttggaatcgtggggccttaacactggaagtaaaaggagttataagacacagctggcttcctgcacccgggacagccccagtggccaggcctggccctattctcccatctggccctcggtggtttctgcagaggttaccatgcacaagggccaggccgcggcccccacctatgtgcaaagaagttggcaatgatgtccaggtagcaggtgcagcgggcaaggtttctacccccaggctagttaaggacacaggagactcgaggagggagaggaccagcagaggacactctatgggggtggcttctggcaaaacagtgctatctgaagatgagtttgaagttaggaatgtttgctgagttggcctggatattggaagtgccctttcttttgagccctttggctctcttggcgttgaccatctgctggtggaacatgggtgggctcccagagcacctgcccctgtggtgtataccagctggatctcagctacacctacggacctgcactggtatagatttgggtcccaggttccccaccaggggcctggctggcttccccaggtccacacccttccagcgaagtcacatcacaagttgtgtggaaatggaggtcaccaccctggccacagaggtgaggctggtgaggcccagagtgtacctgttggggatgctgcaacacttggaaatccggctgcccgaggctggaagccgtcttgctgcgtatgtcacgtaggataatgagtggactcttttctcagtcctggaggacttcctcggccagtctggagtaagccatggctggggagatcagttcttggaagtgctgggttttcctgcatctttggtcctttggtggcacaggccttcccttgcaggcctttggcacctgtctggggtgtgtgccattggctcagtagcccatgggcagtaagttccgtggaatcaggcacattttcagccagcgctgccaagtgctccctgcaatggtgttgccacctgaggtgccacccaaagcagaaaaccctggggctgggcaagacagcagctttcaggagctgggaggaggcatcatttccactttccaggccctgcgatctggtttgtagcctgtaccagggcactggagtcctgccttggcacagctcatggtctagaggaataacctcaggtccaggtgagacactcagcctgtgatggcttcatatggtcactacgttgttgtatatggagagaggactctttcttggttttaaattttgtttttaattttataaatgtaatatattcacatggaaaatttggaaattataaacaatcaaaaagaagcagctaaaaaaagtcctttcataatccaccggcaacatcagttaacatgtggcatatttccttcccgtctcctccactcccattttttttggacttcttaaacataattgagattgtgttttatgtacaattttatagcatgtacttgttagctttgaaacagacccatctgcgtttgcaatttggcctgcagggaaaagaccagattgctgagtcttagctaaagctgtgggagaaggaaatctaaaaataccctcctcgttggcctgctcagggagcgccgtggcctcttgttctcctccctgtcagtacagcagaattagccatgactcagagtgggtctccgtggtgattctgcctctagagaacatgccgtgctcccgacgtcaggctcacaggtgagcgggggcactagccggggacgaggggctggagcctggccggcccaactacagaggggcctggggtttggctcctgccggaggagcccctctagggctctccggggtcttctgcagagcgaacactttgaggggagcatctgtcagagacacatgatgcttcttcacccaaagccccaccctggctgcaagaggagaaaatcaaaaccgtgaagagcattttagagacttccacttccagcaagatggagcagaagtgcctttccctattcctcctgccaagtgcaatgaaaaaccctggacgtcagttatgaaacaaacagaagaggctgaaaggaagagaggagaaggcagactgaccagggacctcaggacctggggatcagtggaggggtgaattccctgggtttcctttgtgccttgcacatctcagacgtggagctgaagaagccagcaagagcctctgcagaagcctgctctccctggctgaaggaccaagccaggggcacctggcgagacagaaaacatttaggcaataactgtggtactccagccaaacaccacagaaaaccctgtggccccctcagctactcgtgccagcaagggctcagcagggatcctggaccaaaacactgaccaggctgaaatgagcccctaccactgggggtgtcagagaaggccaaggagggagccaggagcagggtgggaatgaggtcccccagctggagcatcagtggagaccacatggtaagcctgtgcttcccctagtcagtggtgacaagacatcccttcccctcccactggacgggcagcatcatactgaagagtcaggacttcatcgccactcagaggttacaaggctatccgccccccccacaacagtgacaatggagcccgcatgggacacagtaatgagggattcctgcacctcccaaccaggggaaaacttcctccttgaagagcagtaatgagagcacctcccccacctcagtgtcagcagaggccaagtggggaacctggacgtccaccccacccaagcagaataaggcagcactaccctcttcccctgcctgagttgtgtccagagaaggccactgaaagggaaggtttaaataagactcagagtctcacaccacacacccaaaatgtccagcttgtggtacaaaaccacctgtcatgctaagaaccaaggaaaccccaacatgaataagaagagaagaccaacagacaccagcactgagatgacacagatgtcagggcaaagactaaaacagctactggaaaaatgcttcaaccagcaattgcaaatatgctcaaaacaaatgacaaagtagaaagtctcagcaaagaaatagaagatacagggccaggtacggtggctcatgcctgtgatcccagcactttgggaggctgaggtcggtggatcacttgagcccaggagtttgagaccagacctgggcaacacagggagaccttgtctctacaaaaattaaaaaattagctgagcatggtggcacacacctgtagtctcagctacttaggaggctgaggtgggaggatcacctgagcctgaaaggtcaaggttgtagtgagctgagatcacgccactgcactccagtctgggcaacagggtgagaccctgtctcaaacaaacaaacaaacaaacaaataaatagaagatacaatgaagagccaaatgaaaattttagaactgaaaaatacagtagccaaaatagaaaactccatggatgggtttgacagcagaatcaaggggacagaggaaagagtctgtgaacttgaaggcaggaaaatagagatgacccaatcagaacagagaaaaaatagactgaaaagaatgaacagacatttcaccaaagatgatatccaaatagcaaataagcacataaaaagatgtcatgagtcactagggtaacgcaatttaaagccacaatgagacatcactacacacctatcagaatggctaaaataggccaggcgtggtggctcacagctgtaatcccagcattttggaaggctaaggtgggtggatcacttgaggccaggagctcgagaacagcctggccaacatggcaaaaccctgtctctattaaaaatataaaaattacctaggcatgatggtgctcgcctgtaattccagctacttgggaggttgaggtgggaagatcacttgaactggggaggcagaggttgtagtgagccgagatcatgccactgcacctcagcctgggcgacaaaacaagaaagataccatctaaaaaaaaaaagaaaaaaaaaaagaatgactaaaataaaaaatgccgatgagaacagtgagaatctgaatcactcagacattgctggtgagaaggtaaaatgatacaaatgctctggaaaatagcttggcagtgtcttaaaactctaaatgtaaaactgtcacatgactcagccatggtactcctgggcagttatcagagaaatgaaaaattataatttacacaaaaacctatacacaaatgttcgttgcagttttattgataatagccccaaactagaagcaatccaggtgtccttcagtgggtgacgagaggaactacatccatgtcatgcaatagtactcagcaataaaaagaaacaatctctctctctctttttctttttttttttttttgcataaaatccagatcctgcagaaaaaagaaacaaatttgatactcacaatgacttggatggactcccagtgaaaaaagcctatcccaaaaggttatgtactttctgattccatgtatagaacatcctcaaaatgacaaaattctatcatgcaaaacagatactgttggatggggtggggcggggcaggagggcagtgggcgtggctataaagagcagcctgaggggtcctggtggtgatggaaagcttctttatttcactgtatcaatgtcaattgttgactttgatattgttctatagttttgcaatatattactgttaagagaaactgagtcagtggcgttcttacaactgcatgtgaatctccaattagccccaaattaaaagtttactaaagcaacaattgaacaagaaaaagaaaagcctttgtacctagcaacccagaatgcctatgataagtggcaggagctgatgacaggcgttcttggttcagaacaatgacaactctgggacaagcatgccgctgggagaaagagaccaggagctgcacagccagacagatgcttttgcagtgggatggcagtggggagttggaatggttcatcatttactttttatatttaacacttttttttttaagagatggaatgctctgtcacccaggctggagtgcagtggtatgatcgtggctcactgcaacttcgaactcctgggctcaagcgatcctcccacctcagcctcctgagtggctggacctacaggtgcacattgaagcacccagctgatttaaaaaaaaattttttttttttttttgagacggagtctcgctctgtcacccaggctggagtgcagtggcgcgatcttggctcattgcaacctccacctcccaggttcaagtgattctcctgcttcagcctcccgagtagctgggactacaggcacgcagcaccacacccagctaattttttgtatttttagtagagacagggtttcaccatgttacccaagatggtctcaatctcctgatctcgtgatctgcccaccttggcctcccaaagtgctgggattgcaggcgtgagccaccgcgcccggccaatttttttttttatagagacgagtctcactgtggtgcccaggctggtcttgaactcctgggctcaagtgatcctcccacttcagcctctcaaagtgctgggattacaggtgtgccccaccgtgcccagcctcggattgtcatttagcggtctgtctgaacatcagtctcctgacgtccttcctacagatatgaacagagcccctgctaggcatgagtattcggagcataagctcctggttccccagtgagagacggatgtgtaaggaggcagtctcagggtaggatgttgagtctgggctggggacagtgcactgtgccgtggaattatggagagtttttcctcctatctctaagtccaatgtgtggcatggttatattacatttttaggatggaaaagttataccatatatttaaatgaattaacagcatttgcaatgatctggatgagattggagactattattctaagtgaagtaactcaggaatggaaaaccaaacatcttatgttctcactgatatgtgggagctaagctatgaagacgcaaaggcatgagaatgatacagtggactttggggacttggaggaagagtgggagggaacgaggtgtccttgtccagcaagcgctctgtgtgaggctccatgcatctttatgcattctgctctgatgtttgcaaacacgacgcccggcaataagtgaggcccccctgaggtactcaaggggcttcactcgccgaagctcccctccccacagcaacctgagcttctgcaaaagctgagaagcacgcatgagaagggcacctcccctgcttggaaataattttttggttgcagtagggggttttgtttgttgtttgttgcttgctgctcgctagcttgttcttgcagaaggaagagctggtctcctttgccatcccttactgagggtcgagaaatacagacaggtgtcttcaggctctccgtgcaggccatagtccccaagaattcacttgtgagcctctgtggcagtttatgttgaggattaggtttagtttggggagaggaggatccatggagctggggttccagatttgatgtctaattttagaaaggacactatttttaaatcaatagctgtgcagcctagcatatcactctgaccctgtgcccttaagggacgcactggggaggacattgttcaggacggagcctgacaagaaaggaatgctaccccacgccgtgcgccccaggcggccactgtcgtccaagaatttccaggtcttttctggtatcacttcttggcacaggcggaagaagccatgttcccatcgtcccaacatgcagctggggacctggagaccgctttggcctttctcaaggtcacaggaaggcagggggaaggctggcgagggccctgtggatccgccctgctccagcccggcgtcgggttacagcagtggggacaggagggggaaggggtgtcactgcaggagctaaggagaaatccagggttgacaccctcagaaactggagaagaccaagaaagcagagcggagagtgccccctgcagtccgcagagggcctttgccgaggtgggcctggagccgtcgccgtacccctgggtggcccgcaaggccaggcttggctgcctggcaatgtttgttgtgggcagttgccatgccactccggcggcagcaagagcagggacaggtgtggcagagcccggtggttccagcccagcctggcctcccagcatcaccttctccagttacttgaagtgggccaggtcctggagaccgggcgtgtggttatgggctctccagattcttggcgccttcctgattgcaggagtctggttggcatcatgggacccctgggagactcactttcaggaggggttgtcctttcccccctgggggacacactctgcttacttgtcccctgggagcgctgggcagggagactgcaggtgccagccactcctgcagcttctgcccagcctcctctggtgtcctctgcactgtcaccaagccatggcctcaagcaacttgtgggtgcctgtgatttaggccttggggtgttggagcctgcttggacccactggcaggagtcagttgtgatgtcttttgccagctctcttctgtagcttgaaattggccacggtggaagtatttacaccatggaagttggcaaatgcacggacccagcacccctaccccatcccggagagccagttaccagcacacgtctgccttttggggtcttttgtgcaggactgatggatggagtcgcagcagacacttggcctggccactgtgaggctgtgtggtgggaggtcgggggcacctgagacagagggaggaggctgagagtctgagggggcagccagggctggagggccatttgggattctgttggatttccctgcactttgtccaggggcagaagcctccctcccaaggtcaggccccatttctagccgtgctggtcgcacatccctgtgagcaggggtgcagaagagaaatggtccctcaggagccccacacccgctcccatccagctctcctccagatgacatctccaggcactgggaccccacagaggcaggccctgctcagcctgcagagctcccggtggagagggagggcgggggtccaggtggcctgaggagaggggtgcaggccagctgagggggctcccagaactccacgagctcagagacgggctcttgcccttgcagccccatccttgggatgccccagcccttcatccagacctctgctgtgattgtgtcaggacctgtccctgcagtggactggaagctccaggtgggcaggccttgccgtggtcacctgtgtccacaggcctgggcagagcaaactgatgagtgtctactaaatcagagagaagacacaaccagggagcgagtgcacgcccgggccgaccagggctgcgggcatcatatcccgctcagccgctgcctgccctccacgcgcccctggctgcctctctcagcctcggccccctccactcatgagtgggaataaataagagagtagaaaacgtaagtgaggttcttgtctggccgcccggctcatagcaatgtttaatagatagtaactggtgttatgactgaagacgtcctttgtgggctattggagttcttaatatccccgagtaaccacagggcaacgctctggcttgacaaggggcggcactgctggtcagcagcccagccagccgcagcggccacttgtgttcccagctgtggcttgtgatctatggtcgactgagctgttactctcctcggttagacacgcatatgcacacacatgcacactcatgtacttacacatgtgcacgcgcatgcaacgcacaaacacatggacacacatgcgcatgcatgcacacactgtacccacgtgcacacacgagtgcacagacacgagggctcactgtgatctgctctaatgcatggtcttaatagctatataatattccacggttcttttttctttctttcctttttaagatggagtctcgctctgtcgccaggctggagtgcagtggcgcgatctcggctcactgcaacctccgcctcccgggttcaagcgattctcctgcctcagcctccttagtagggggggactacaggcgcgtgccaccacgcccggctaattttttgtatttttcagtagagacggggtttcaccgtgttggctaggatggtctccatctctcgacctcgtgatccgcccgcctcagcctcccaaagtgctgggataacaggtgtgagccaccatgcccggctggttcttatttctttaattttattgaagaataacatacctacggagccgtgtgcatatcataagggtacaatttgatatactttcatggagtgaaatacatccctgaaaccagctccggatcgagaagcaggacatttcccaccctcttcttgccctttgcctgcaacccccatccccggggtgaccattccccggcctctgcccccgggacagttttgttcgctcctttgctttatggaggtgaaaccgcgcgatgaggcccctttcgagtctggctgcttttgcttagccctgcgcttgtgagatccctccgcggtggcgtggagaggtgtggccacttcccgcttcgtggcaagtcgtgttctgccatttctccgaataccgatggaggcttaccgtgctggaccatggaatggggtctggaatgttctcatacaggtcctgtggtgcaatgggcgtgtgctggcactgggattctgtgtctaatgctcttcatcctagacctgtgagaggagactgttgtccccagggcagtgaggaggaggccagctttggagtggtcaccctcacctcgccgttacacacgtcacttcatttaatttttaaacaacagtcctgctgccggtggccttttctgtgtgctatagaagtgagagcaggtgcctggggacacttggaggcccccctaggtttgtctgtaatgagcttgtgctggcgactggcatgttctgtcccccccacggctcccagcgtgctcccagcgccctcccacagctttaggcaattaagacacgggcttggagtggccattgcaggacctgctggtaatgggggtgaggggtaagctttgtttccaaggcaggtctgtgccctggggtcttgtccccctccacatgcacactgcctgggtggggctcattcctgcgggtaaggcccgggatcaggaatggctgtctttcttctgcccagagggagctgcttgtggcttgaggtggccctgagactgtgagacaggccactgggaggcccaggctctagcaaaagtggggatttttttctctccctagttttggatcaggtttttgaggttgtgcaaacgtaggaatgaggcctttcaccccgtcagttgtctgtcgggctgtgtcgcacagtggcccctcgggacagcctacagagctgctgtctcttccaggcattgctgcagggcctgctgtctctgctgtcctgggccaggcgctgagttctgtcgcggaaagtctgagggcagagctgggagggcagcgtttccaaagcaaatggaaaaggcaaacgggaacgtggcgggcagggtgggcagggcagcctggaaacaccctttgtcccatgcagctcattcactcggccaggatttgccgagtggcttactgcactctgtggccctgaaccagggctgggggatctcagggacatgtgtgtccacagagatggtcacctgccacctccaccatcacagatgccatgaaggctgtgaagggaaacagacctgtaaggcagcggagccgagatggggttgatgagtgtcaccagtcacaagcaaggtgtctctgttctctcttctacatgttgatcgaggtataacacccaggaaaggacatcaagtgtacagtttgaatttttgcacacacgtacacccgtgtaacccccacacagatcaagatgtagaacattccagcacccagaagtttccccgtgccccttcccagtcagaccccccgaccccaggtcacccctgccctgacttgcagtgtagagctcacccggccacttcctcttttgcccacagcaggtgaggagggccttctactgggaaaaactgtgactattaatttaggtttaaaatgtattggtaacaggcagatctggccagtccctccctggcttcaatctccttggtagcttccaggattactcttaggagggactggaggaaaagcccctctctgtccccatggcacccacagtgaccgtcacagccctcctctgggccctcactgccaccagtggactcactgtctccctctgccctgtgcacagcttcttaatttgggtccctctggtttagctcagtgcagccagaattcacccagtgcctatgtgagtcgggcactgggctggcccaggggcctttggaatgaaggggacagtcggtgagctgaggttgtccccaaatcagaggtgtgaccctatgagcagccaggtttttaattttgtaattgagatattcacatgccatacaattcctcttaaaatacacaattcagtggtctttaggtttttaatatattcacaatgctgtgcaactatcacctctaattccagaatattctgtcactccaaagagaaaccctgtacccattagcagtgacttcccactccccacacccccagcccctagcagcctccagcctctttcaatctctgtggattcgcccgctctgggcatttcatgtaaatggaatcagacgatacatggtcttttgtgtctgactccattcactttgcttaatgtcttgaccgttcatctgtgttacggtgtgtatcagagtttcacttctttttgtggctgagtaatattccactatgtggataggccacattttgttgatctgttatcagctgatggacatttggattgcttcctgatatggtttggctgcatcccaacccaaatctcgtctcgaattcccatgtgttgtgggaggtaattgaatcacgggggcaggtctttcccatgttgttctgttctggtgatagtgaattagtctcacaagatcagatggttttaaaaagcggagttgccctgcacacgctctcttctcttgtctgccgccatgtgagacatgcctttcaccttctgccgtgacggtgaggcctccccagtcacgtggaactgtaagtgcattaaacctctttcttttgtaaactgcccagtctctctggtatgtctttatcagcagtgtgaaaacggactgatacacttccactttttggctattgggaatagtggtgctgtgaacactaatgtataggtttttgtgtggacacgtttccagttgtcttggatatatacctagttgtggaattcctggctcatgtggtaattcatgtttaactttttgagtaacgagcggccatttttaaagactggataggaatatgtaaggaagaaagtaaatttattcacttccgttcaggaaatttacctaccaaacaacatgctgaatgggaacctttaggggcttggctgaatggccctgcacaaggtgtccaggatgcactgcctaaaagctgtggaccctgtgcctgggaggaggaccagcaaagggcagagccccccgtgtttcagatggaaaggttaagtaatgtgactctggtaatgcagtccagttcatttatgagatcatggacctcttatactacagactttttgtgtttttttgctgagtcttttgctccctaaccgtgttccctggctggccaccctgccagcaccacgctggtcctcaggaagcatcatcagtcagagacacaggcctttgctgtggcctcacatgctagcagaggaagatagacaacatggcgatggatgaggaagttgggttgtctgtaagaggatgagaagggctgtcattaaacaggtgggttcaggtgggtctcattgaaccatgagatttgaaccaagacctaggggggtgagtgaggggttggggaagggagattaatgcgagttctggggaaggaacattccaggtgaggaaacagccactgcagagccccttgggtgttggaggaagacactcaggtggctggaggggtaggggaagcattggcagggagaggccagggctggcaggcctgccgaaggctttgcttctcttctgccaggctggccatcacgggccttgcacagaagagagcaatgacctgccttcaggtttcaaaaggtccctctggccgctgtttgagagaaggtcacagtgggatgagggcagagcagggggactgctcaggaggcttttgcagtaaccgacggagtggtggcggtcactggcaccgagaagtgtacatgctgcaaagaaaatactctgttcaggagaccaggtgcggtggctcacgcctgtaatcccagcactttgggaggccgaggtgggtggaccacttgaggtcaggaattcgagaccagcctggccaatatgctgaaaccctgtcaatactaaagatacaaacattagctgggcgtggtggtgggtgcctgtaatcccagctgctcgggaggctgaggcaggagaatcgcttgaacccaggaggtggaggttgcagtaaaccgagatcacgccattgcactccagcctgggcgacagagcgagactccatctcaaaaaaagaaagaaagtaagaaaggaaaggaaagaaaagaaaaaaaagaaggaagggagggaggaaggaagggagggagggagaaaggaggaagggagggagggaggaagaggggaggtggggagggctctgttcacataataaagaaatccagaggtttgaccatgggcgtcatttcatcactgcacttggcagaggtcatcgctgctgctcccatccagctcagtcctgtggtccctgtcgtgtgtagaaacacatactctgtacgttgctgggatcatagcagaatatcagctccaccaatcctggttcctcaatggcgacacccacgcactcagggcatgtatcagtgtgcatggagttgcctcgcgttcaactgcgtggtgtgggtaacgcagttgtgccattgtgtgtctcacaattcccagactggtaaataatgttgcttctagttttttgctacttaagcagtgtcacagtgaacattcttttataaacgtgtttgtgttttaaaaataagcttattttggaataatttcatatgtacagaaaagttatggagttaggatgttttcatccactcttcatccagtttcctctgtgaacacctcacacatctgtggtacatttgttacaaccaagaaactgacattggtacccacactattcatgagacaccagactttatttggatttttttctttttgagatggggtcttactctgtcattcaggctggagtgcagtggcacagatcatagctcactatagtctccacctcaagtgatcctcccgcctcagcctcccaagtaggtgggagtacaggtgcacgcccccacacccagctaattttttattttttgtagagacagggtctcactgtgttgcccaggctggtcttgaactcctgacctcaaaggatcctcctgccttggcctcccaaagtgctgggattacaggcatgaaccactatatccagtctttatttggattttactacaaacatatgcttctgtatacttgtgtgactatttgtttaaggtacagtccctgaagtgggattgccgtgcctgatccttgctgccacatcatcatcccataggggacagggccccactgtcccccatcactgaacagtgtgcccaggtgagatcatggacttgggccccctaggccagcccagtctctttgcagccaaggaaagtgaggcttagctgtcgggggctgtggggggatgcagcttgccacacttgacacccaaacgctgattttgtttacatgagactcaggtccgagtttatgtctgagacctgggaatcaaaaagccacccccacagcctccagggacctggctcccctggagccaccgtgctgccccacaggtgtcacccatggaggctgcaggagcacctggcgtggtccaggggacacgaagccctggtgctggctcctcccaacgcccctgtgagttctgcctcccatagaccacatgtgtcatctgcgtgcacatgtgtgaaacccgaaagacaagcagatgagacccgcctgccaaaatatttgctgccgcgcagaacagtaagtcgtttttgacatatggatctcagcgcgcagccacagcaaacaggcagcgtggcgctgaggggcacaggtttgctggggggcgtgagccgggagcatcgccagcagcaggctcgcccccctgcgagggcgcgcacggattcgctcgccaccaagagcagggccccaagaggggccctcggcatagtcccctcgagtccccagaacttcacaggcagagagcctggctcgaggatgggcgggagctcagtctggctttgatctgcgggaggtgttgtgtgcagaagctgtgggcaccgggggctgcagagcttcagacctggagcctgctcccagggccgatctgaacccggcacctgtgctgacccaagggtcaaccaaagtcctgagtttggtggcgccgagggaggggagtggtcgcatcccaccgggtgcctggaatggtgctggaggaggcagcatctgatttgggccccgtagggccagaggggggatttgtagggacagagcaggagggagtggagctgaggctgggggagggcatggtcggaggtccagaggtgggagaggggccgccatcctgaagcacacccctcctcgtcttcctgaggcctccatcccttcctgatcttccaggtcatgggctccaggcttgggcccactgctgtccttctccactctctccccagggaacccacctgggttgtggccttaaacccagccagatgatgcttctccagcctctgcctcctgccgggccctcccctgagctcagaagctgccatcagtagccatgcaacctcccccttgccatcatgaagtatctcaaacttggcagcctcgaaacagagcccttggggagtttaagcagaaacagaatatttttgcatagtcttaaagtaattccccccacccccaaatattgagcaattacaaagggcaaaataggaagtttacggtggagaatcctggtggacacagccttggccaggtgatcaaggttcatgtcaccagtcatgaagcggcgtgcacccctggtgtgctgagaagggcagcttacctcctgcaggtgcccttgccccaacgcaccactcagcctaaccatggggagcatccgacaaaaccaagctgtccgcatctccaaggacaggcacactggggcttagggcttcagtgggggcggaggtacagttcactccctaatacgccatttacttggagaagccctctccagctgcctgaggcagaagcacccggttctctctctgcaggacccctgctttgttcttcctaggatgcgtcagcccctgattttccatgacagtcccctgtgcccatgtcctgcagcctctcctgggggcaggagctacagggtttcttgactcctacctcagcactttggtccaagctctgagcagagacctctgtaggcgtctgcaggactggctggcccttgtgtctgtctttcccctcgtcctggccccctttgtccactcctgcaccagcttccctggacccactgccactgcgtcacgtggtcggatctgtgtcccctgcactctcaccacctccaacttgcatcccggtcccccacaccctgacccccaaaggcattgtgcatgtggatgagtgagtgaaggaaaggctggcgtgttgggtgtgcgaggtcgcaggggcatgaggtgcctggacggcagagagccagggctgggtgaggacctgggtgccaggtcgggggtctgggcagcctggtggccccctgaaaacgttcacatcccttggggcctgctgtgatacatactaatcagtgcttcatgagaaaggtatgagccgaaagaaatgggggttcccactggattggtcgtttctgcattgtccggagctctcagacctggtttcttaaccactgtgttcactgaacaccccgggcttgatcagctgctgagggtgacttcacatgagattataattgtactgcctaatagagtgctcacacatgttaaaactacctggcaggcaggagtgagaatacagctttcccagaaacgtgttcaaagaaaaacccattaccaacccggcagaacataaagtactagtgtggggtatgaggcagcatgtgggggcgctggggtggcagcagggccagaccccacttcaggggttgcccccaggaccccccttgcggtacccgtatatcccacccccagactcctttccatgagctgctcccagaccccctcatatccatcctgcctccagaacccctatatcttgctcccactccctaccatatgctgttcccagacccccctccatggcctgcccccagatccccctttgctgccacccctatatcttaccccagactcccccatatctcgcccccagaccctcctccatggtctgcccccaggcctgctggtaatatgggatacagaggtctcctcactgcacacacaaaactccttccctgagcgagggataggcagagctgagggcgggggtactggggggctgaggggggttctttagggcaggagttacctgccctgtagacggggagaccacattagtgtttgtgcaaagccctgccctcgtgcacctgtccttccgtagcccacgatacctcatccagcccgggcccgtgggtgggctgctgagcacccgaccacagccaggcctccatgtgccactgtcaaggggacttggcccgccatgatcctgagtgcacaggtacattgctccgccctctcaacagccacgacccagaaataaagtaggcactgtaatttgcattttgaggataaggaaaccgaataatagagtctactgagcgcatactcagtctttccagaccctagaaagtaggtaccattgtcatcctcatttcagagctaggagagcagaggccagacaggttccatagcctgctcaggtgggtccgtgctggaccaggagaagggccaggtaggctgatgggtcctgagcttgtgctcccgaccgccaggctgtgtgtctgatggccgaggccagggtggctcagccaagcccagccaacccaagactagaccatccccagcgtccaccccagcctcctgggcacaggggtcacctcccacccctggcccacccatacagccttttcccatctaaccttttctttaaaggaaggcatcccttggaatgagtccaccctgagattttatggatccaaagaaaaaacttaattagctgcataaactgtcagttgagactctccagaggacacacctccggctttcaggttccccagggaatctgaggctctgaggcaggtggacagccaggtccctctttacccagcaccaggtaaccttagaggcctggccctgccttcctcattttgaaatgtcaccctgtggtcatctctccttccctgatgtgaagcagtgaccagttctgccccatcctacacatgtgtgcacacatacatgcacacatgtgtaaatacacatgcatgcacatgcatatgtgtgcacacatatgcacataccttcaccttcctatccctccccaggggaaggccttccttggggctgcccctcctccactctggcagcattgggacttgaatcttgtggccccgtcacaactgtactcagctactccagctccttgtgtgacctctcagcccccaggctctgagctacctgaggtgaggtggggccacactggtccccacctcggtgcagcacacacagccccatcctgggagtgccacccaggtttcctctaactgtgctttccaagggctggaaggacctcttcctctatgccaggtgtgctagagtggccccagccgagaacctgactgggaccaagccccaggacagtggtcaggcacacacctgagtcgctcttcctcccatagacacatttggagttcccactgccttcctaggccccaccacatgctgtcacctccaggaagccttcacaggttgctccctgctgatagccttgacctgcttcccagggcatttgcaagggagtagaacgaagaccaagtccgtgcaggggctgctggctctgtgctcagcacacgccccgtgaccacctcaggggcggctctgcgagtccccacttgacaggtgagccacagggccacaggcatggcttggggtcctctgcggagcccgatgtgtcactggccctcacgtgtccttctccgatctgctcactcattcatccattcatttattcagcaggggttcttgagtgtctctgaggtggagcgtctgctgtgaaggactggcgggacgcaaacggttaccactggtgtgacgggctctgatcaggaggcacagggtgttggggagctcagagggtgacatctcaccctgccttggccagtgtgggagggagagggttcagggaggatgtaactgtgtgtgtggcaggtgctgtggtggcacagagctgaggggacataggcacagttgctggatgcagggcttacaccgcgccacgcgtcagaagctagcaggggctgagcagcatctctgccctccccgcttgcacccccaccatccagtgcagcccagcacctagggggcatggggccagtgcctggcacattttgtcctgactgtggaaaaaagctcttcacagccctgagtgctgctttagctttggctccacccatcttaggctgctcagaggcctcaggcctccctggagggccagaagggattcccaggggcaggatagcacggacgggggggtccgctgtgtaagcctgggaaattctggctgcttgaagctggcacactcccctgaggctgttccaggcacagtcactgggtctccccgtcgaagtggctctaaggcaggtcttcccggttaccagcaagcagatacatgttgtaacgggctgagagtgggtgtgtatctcatattccccagaggagcttacggacagcccctctttaaggaacatctcccgggccgagcgttctgagcgccctctgagcaggcagcccaccaccggggcgctggccagtctgagtcagtcctgcctgggaggcagtcaactctggggaaggcagaagaatcacagcactgagtgccgtccagtttcccctcaactatattcgcggacacggcgccaacaggggaaaacttacatagcacctattcattctgaggcctggccggcctctggaaatcagcatttcagtgttggccaggaaggaggccagaactgtgctgtagcatttcaatgtatggctgtcccacaatttatattccagtcccctgatgatggacatgtaggcggtttccagtttttttcatgatcacagatcacacttctgtgaacagctctggatgtgtctccttgtgcaaatatggtgctaggtgttcttcagagcatttttctccaaacttgccgggtaatatggtcaccttggggagtttgttaaatatacatatttccaggtctgctctggtgggtctgatatttggagccaggaatcttttctttcttttaacagatacttaagtgattcctgtggtccaggaagttttgcaagctctgatgcagaagagctcgctggagcaaacatgtatgttctgttttactaattagatatacgctgttgatgactccaaagtggacgtgccatttctgtcccctccagcagtaggaaagaatcccattatcccacatcctggccagttcttggtattgtgagatttttttaaacttcttctcttaagactatgatggtattttgttgtaatataatccacattttctatattattactgtgcttgagcacttcttcaaatgtttgatgaccttgaccattgaaacttcctttttgtgaattacctattcatatcctttgtagcttcactgtggaatgcttgttactgatttgtagccattctttatacatttcactcccactcgtttgtcagttatatgtggtgcacacatctgctcccagtctgtggtttgtctttccactttgtttatggcctcttattgggacacagttttaaattaaaatataatcagatgtattaatcatgatgttgtagtttgtgcattttctatcttgtctaagaaattcatccctctccttgttatacttagaaagaaggatattctacattctccttcaggagttctaaagatttgctttgcacattcaggttccaaatctacttgaatttgacttgtgtatatggtgtgaggtagggatttgattttattttctatgtggataacagttgttccattatcacttttgagtagtccaccttttctctcactgacttataatgccacctctgtcatgtcagcttttcatatttatcagttcctgttaaatgtatctttaaagctttattgagacataattcacatgatacaatttacccatctaaagtgaataattaatgtttttattatattcatacaccatcgctatcagtcaattttagaacattttctttttttttttcttttttttttttttgagatggagtcttgctgttgtcacccaggctagagtgcaatggcacaatcttggctcactgcaacctctgcctcctgggtttaagcacttctcctgcctcagcctcctgagtagctgggattacaggcacccgccaccacacccagctaatttttgtatttttagtagagacggggtttcgccatgttggccaggctggttttgaactcctgatcttgggtcttgggatccacccgccttggcctcccaaagtgctgggattacagacgtaagccaccatgcccggctattttcattacccccaaataaaccttgtaccctttagttacctcctcatctctgtaaccctaagcaaatactcatctgctttctgcctttgtgggtttccctgttctaaatattttttatgaatggagtcatatagtatgtggccttttctgtcttcttttactctgcgtgttttcaaggttcatccatgttgtagcatgtatcaggacttcatttctttttatggctgaataatgctccactgtatggatagaacacagttatttattcattcctgtgttagtgtatatttgggttgtttctgcctttggctattgtgagtaatgctgctataaggattcatgggcaagtttttgtgtggacataggtcttcatttctcttgaatatatgcctaaggagtggaattgctgggtcacgtggtatctatttttaatcacttgaggaattgccagactattcaaaagcagctgcaccattttatgccattttacattcccaccagtagtgtatgagggctgatttatctatgtccttaccaacgcttcttatctgactgtttaattctagccattctagtggctggtgaagtactatctcattcagattttggtttgcaattccctacaatgatgactagtgatgtcaggcatcttttcttgtacttattggccacctgtatgtcttccttggagaaatgtctattcaaattttttgcacaattttaatacatacatatatgtatatacacacacacacacacacacattttttctttttaaacagattctgctttgtcggccaggctggagtgcagtggcacaatcttggcttactgcaagctccgcctcctgggttcatgccattctcctgcctcagcctcccaagtagctgggactacaggtgcccaccaccacacccagctaattttttgtattttttagtagagatggggtttcaccatgttagccaggatggtctcgatctcctgacctcgtgatccacccaccttggcctcccaaagtgctgggattacaggtgtgagccaccgcacctggcctatttatatatatattttttaaagtcaggatctctgtcacctaggctggagtgcagtggcacaatcacagctcactgcaaccttgaactcctgggctcaaaccatccttctgcctcagtctctcaagtagctaggactacaggtatgcaccaccattcttggtgaatttttatttttatttttatagagatgggatcttgctatgttgctcaagctggtctcaaactcttagcctcaagcaatcctcctggctaggcccctcaaagtgttgggattataggtgtgagccaccacatctagcctcctttgcacattttaaaagtggattagttgcctttttatcattgagttgtaagagttgtttatatattctggatataaggcctttatcaaatatatgatttacaggtacagttgacccttgaataacatgggagttaagggtgcttgctgcctatgcagtagaaaatctgtatatacctttgacttccccaaaatttaactacagataccctgctgttgactggaagacttactgaaaacataaacaattggttaacacatattttgtgtatgtattacaccctatattcttacaataaaggaagccagagaaaagaaaatttaagaaaagcataaggggctgggtgtggtggctcacacctgtaatcccagcactttaggaggccgaggcaggtggattgcttgagctcaggagttcaagaccagcctgggcaacatggtgaaaccttgtctctattcaaaaaaaaaaaagaagaagaaaatatatttactgttcatgaagcagaagtgaatcatcatgaaggtctttatcttcattgtcttcacattgagtaggatgtgagtaggctgaggaggtggaagaagaggagggttggtcttgctgtctcaaggtggcagaggtagaagaaaaactgcatataagtgggcccatgcagttcaaacccagttgttaagggtcaactgtattttctcatattttgtgggttgtcttttcattttcttgatgttgttttttaaagcataaaagtttttaaagttttgatgaagtccatttgatcttttattttctcttgttgcttatagttttggtggcatatctaagaatcctttgataaatctgaagccatgtagatttacccctgtgttttctcctaagaattatatattcttagctgtaacagataggtttttgatacattgttaattcacttttgcatatggtgtgaggtaagggtacaacttctgttcttttgcatggtgctatccagttgtcccagcagcatttgttgaaggctattctttcccctttgaatggtcatggcacacttgtcaaaaatcagttgaccattgtagtaggctgttcttgcactgctataaagaaatacctgagcctgggtaatttataagaaaagaaacttaaatggcttacagttctgtaggttgcacagaaagtaaagcagcatctgcttctgggaagcctcaggaagcttccaatcacagtggaaggcaaagcaggagtaggcatctcacatggcgagaatgggagcaagagtggtaggggtgccgtatacttctaaatgaccagatctcatgagaacttactcactatcgcaaatatggcaccaagccctgagagatctgccccatgacccaaacacctcccaccatgccccacctctagcatggaggattacaattcaacgtgagatttgggtggggacaaatattcaaactaaagcaaccatacacacaaagttttatttccagatttacagttctattgcattgatcactgacatgattactgttcctttgtagtaagttttgaaattaggaagtatgaatcttcctactttgtacttctttttctagatcattttggctattctgggtcctttataattccatatgaattttagattcagcttgtcaatttcaacaaataagtcagctgggattctgaagggggttgtgtcacatccgtagcccaatttggggagtgtcttagtccatttgtgctgctataacaaaatacctgaaagtgggtaatctataaataagagaaatttagcttgggcaacatagggagaccccatctctgaaaaaaaaaaaaattaggcatggtggcgtgcacctgtagtctcagctactcaggaggctgaggtgggagaatcacttgagcccaggaggtcaaggcagcagtgaaccatgatccactattgcattccagcctgggcaacagagcgagactctgtctcaaaaaaaaaaaaaaaaagaaaaagaacagcaatttatttcctcacggttctggagctgggaattccaatatcaaggcactggtaggttggtgtctggtgagtgctactctgtgctttcaagatggtgcctcttggtttgtcctcacgtggcgaaggagggaaaggagaaacagggacgaacagtgttcatagcagctcttttatttataaattgctaatcctgttcatgagagcagagccctcatgactgaatcacctcctaaaggccccacctcgaaatactatcacgttgctggtttagtttcaatacatgaattctggggggacattcagaccgtagcagggagcgttgccatcttaacaatattaagtattttgctccatgaacatgggatgcttttctgtttatttagatcttctttaatttcttttaacaagtatcattaatccaaaaatctgaaatctggtatgctccaaaacctgaaactttctgagcactaacatgacagcaacagtggaaaattccacccctgtcctcacgcgatgggtcgcagtcaaaacccaatcaaaaccttgtttcatgcacaaaattatttaaaattttgtataattaccctcaggctatgtgtctaagcatatatgaaacacaaattttatgtttagatttgggtcccatccccaagatatctcatgtatatgcaaatattccagaatcaaaaaatatatatagagagaaatttgaaacacttttggtcccatgcattttggataagggattctttacttgtattttgtagtgttcacaatataaactataatataatacaaacaatataagctaaaatataaaatttgcacttccgttgtcaaatttactactgagtattttattctttttgagctaccataaatgggactgcattcctgttagattttttctttctttcttttttaagaaatggagacttaggccaggagcggtggctcgtgcctataatcccagcagtttgggaggccgaggcgggcagattgcctgagttcaggagtttgagaccagcctgggcaacacagtgaaaccccgactctactaaaatacaaaaaattagccaggcatggtggctggcgcctgtagtcccagctactcaggaggctgaggcaggagaattgcttgaacccaggagatggaggttgcagtgagctgagatcgcgccatcacactccagtctgggcgacagaacgagactctatctctaaaaaaaaaaaagaaaaagaaaaaaaagaaaagataaggagccttgctgtgttgctcaggctgacctcaaactcctgggctcaagtaatccttctgcctcagcctcccgagcagcaagcagggaccgagcagcagggaccataggagtatgtcactgtgcctggctagatgtgtgtgttttctttttttggagatagagtcttgctctgtccaggctggagtgcagtggcacaatcttggctcactgcaacctctgccgcctgggtttaagtgattctcctgcctcagcctccggagtagctgggactatagctgtgtgccaccacacccagctaatttttatatttttagtagaggcggggttttccatgttggccaggctggtctcaaactcctgaactcaagtggtctgcctgccttgacctcccaaagtgctgggattacaggcgtgagccacactacacccggcctagatatgtttctaaaacaacattgtgtaggaaatttttcttaggctggttcaaggctaacatgctgaaggtcccaggtagtgaagcaggtgaaccctgaaggaccgtgcccctcccacacccaccctagcagctgttccacattgtagatggatccctgcgtccctacattgtcacctttctgtctaaatgagaggtggggagaaggaggggtgaagaccaatgaggttagtcacctcaaggggtggggccggtgcagagaaagatgggaactgttccctagtcctcttccttctggagttgggagggggaaatagccctgccccaacatgtgatccagcatggactatggtcagttacaaatatgagtgagccaggcccctgccctgaaggacctcccagatttgtggggaagacacaaactcagcacagaatggaaaggggcctggggacacagtgctgtgccgagcttggaatttgtttcatgaagggacagccagcagtgtctgtgcaggtccagggaggctccacaggggaagtgagatttgagctgaggcttgaaagaaaggtggaccgagaggagacgactttccagggcaggaagtggcctgcacagaggccccgaggcgagaaggaccacaactctcctgtggacctcctctttgtacgatcagttttaattacgcaaaaaaattatgcagttaaagctttgctcatttaaacagaccttccctggattaagagtaattaggttttattgtcattgtcttgaaaattgccttgccatggacctgtgaacacagaattatttatatatgtgtgcatagaaatcatctcatggatttttttttaactgagatgaacttgggggattttaaaggtaacaaacaaccccttctggctggtgtgggggaagccctaatttgtagtgcttgctacttttttttttttttttttttttgagacagtgttttgctctcgtcacccaggctagagtgcaacggcacaatcttcactcattgtaaaacctccgtctcccgggttccagcgattctcctgcctcagcctcccgagtagctgggattacaggcacctgccaccacacccggctaattatttttgtattttcagtagagatggggtttggccatgttggccaggctggtctcgaactcctggcctcaagtgatccgcccgcctcagcctcccaaagtgctgggattgcaagcataagccaccgcgcccggcctccactttctgtggtgtaaatattcctaccatggctgatttcctctggggaagccatgtcccctccacttctaccttcatggtctttgcttgtttattttcaaatgtggcccaaatccaccctgaggcaggcgcagtggctcacgtctgtaatcccagcactttgggaggccgagacgggcggatcacctgaggtcgagagtttgagccagcctgactaacacggggaaaccccgtctctactaaaaacacaaaaattagccaggcatggtggcacactcctgtaatcccagccactcgggaggctgaggcaggagaatcgctggaacctaggaggtggagattgcagtgagccaagatcatgccactgcactccagcctgggagacacagccagactccatctaaaaaaaaaaaaaaaaaaaaaaaaaaaccaaaaaaacccaccctgagtttaaaagaaaaaggctaagaaatgcttgctgggctgtctcaggggtggcagtggagctcccgtgcctcccacagatgaggacgtggaggccctggccgagtgctgaatgcaggttgggggacagggctgccggcctctgtaaggatggggaccccagacccacccggtggagctggggctgaaggccgtgataaacacagcctcaccctggcattgcccacctccactggccaccagctttgacggacagccccactgccactgcccctctccaggcaggccacattcacaggtgttctgtacagagagcagaagtttgagaaaacgtgacccactgaacagacacttgctgaggcccgggggcttcatgtgtcaggcccagaggtggccacaggcacaacacgcgtccctcagccttgccacctctgctgccctccaaggtgccctgggtccagctggccagaagcactgctttctggagcagccacttatgcttttacttttttctcttctttttttttttaagactgagtcttgctctgttgcccaggctggagtgcagtggcacaatcttggctcactgcattctccagttcaagtgattctcctgcctcagcctcctgagtagctgagattacaggcatctgccaccatgcccggctaatttttgtatttttagtagagatggaatttcgccatgttgaccagactagtcttgaactcctgaccccaagtgatccgcccgcccaaagtgctgggattacaggcgtgagccacagtgcccggcccagctttttcattttgaaatcaatacaagtttttacagatgtctgcaaaaaatatccatattgatggatcctggctcctcagaatctgaggtttttacaaatgtctgcaaaaaatatccatattgatggatcctggctcctcagaatctgaggtgacagcagcttgcagaggacactgctcccccaacactgccttccaagggagacatgccctaccccaaggcctcccttgtcccctccctcctctgacagtcaggtccagggggtcctggagagggcactggcccaccctccacacatgttgcacagtgccctgggaatgaggaaggaagggcaaaggttagggaaaaccagacgtcagtttcttgaccagccacagccggtgcagcgcggttatttatagccctggtggagcgcccataaatcaaggctttccccagcagcgcggctgtgagggctccgagatgatctcatggtgcccctcccttgaaccatcccagagaaaggaggcctgtcaccttcaaggaccaatgcttctgccgggactcaagcagaacctgttcctgctgctgcaaggtttacaggcagccttggggacagtccgtgcagaaatgtcaggagccttttcctgcataaggcatctcagagcttatagcacctccttggcggtggccgtgctcgcagcctgatacatgggacctctgtctcacttgcagtgtgcaccgcaggtcctaattccttatctgttccaaccacaaaagcttccactgctggatggagccctgttatcattcaggcttctgagccacctggaaggcaaaggcctctctgtgaaaatgaaaacttggctttaaaaagctggcatgggctcagccatggagttgcttagatgtagttcacaatctcgcagacccacggcaggattccacccaggagaaggtcctggaggtggccatggggctcagcagaatgagccgggaggagcaggactgttgacacgagagcaggggtcaggctcagtgcacaggtcccagtgtgcagagctcacccggccccagctttcatcacccatctgagatcggcctccttcactcctgttctctgggacttccttgtgtgttagagactcgagcaagaccctttcttgtctatccccggacggacccgcctttcccgcatctctgggggtgaggtcggctctcgttcaggcctgcagggtccctggtgccgcagcccctctggttggaaggccccctgcgtgcagccccgtcctccagccccgctcggctctgaatgagttcattatgtctcagcgcgccctggccgccaggctggcagttcttcgggctggcggggctcgggagctgtcagcctgccaaatccagttgtttgacttcatgtttcaaggccaaatcctttcaggaaagttctctccatcccaccactccaccgccccccgcccttagaaaaataaatgcgtgattgactggctttgcaggttttttatccatcgttctttccaaagaatagtgtgaacagctcattcgattcgttcatgtgacgtcctccctctcccaatccctgtctctctctctccttccacagccacatgaaattgaagtgggagaacatggtgtgtgagcattattgggggtggggtgcggagcaggcactggctttggttgaggtctgcaaaggaaagcacccccactgccaggctgctcaggagtggctcccaccctcgactgcggggaagtgctggaaccctccgcacgagggcaacctttcttgggctctgaaggcgcctctcatcctctgagccaagaagacttctgacccagaattctgagttgagttccgacgcaggcgtgggcgatggtgagcaactccaggctaccccgagaaagccgctgtgtgaccccattaggggacttggctctcctgccaagcccccacccagcacctgtcccttgtgtcatgactggacttgttacttctagcccaggagctccaggtgaaggggactgtgttggtcctgtctgcccaggactctccccacccgcacagtgtacctgtcccacagtggcaccaacaaggctcagctgagcccttgccagaggagacacggtgggcaccagccccagcgctgccacctgcctgcctcctctgccaccgagggaagccatgtcgccttcctgagcctgcttctctgtccacaaaacaaagactagataattagagtgcacacttggagggacaggatggcttcgtatccatctggctgtgccctgtaactcaagggatgggactgtgtcattggtaaacactgcaacaggcctcctttccaggaaacaggatccctgtctcagacagaagcagtctcgcccatcctggggcctgagagcatcattcctttgtgagactcaaatgtgaggaattcctgtttcctcaagtctgtgtggggagtgcagagcagccctctgagggggtagcgtgtgcaggaaataagccggggggaagggggcaccgcgggtgggtgttaactgctgcttcggggtccagtcctgttaatgaaagcaggggtgaggcaagcggggaagactctctgtacctgatcagtggcatgtgtgtggctccagccggcatggcctgagctgccggtgagggagaggcctcagggagaaaagacaaaagctggggtgcccctgaaggtggggcagagctggggcagtcaggggctcttccacaggtgcaggcctggtgctggaggacacagtccataccacctccaacccccaccacctcccctgccatggacagtgtggggcaggctcctgaggatgaggcagcctgacccctacccctgggctgtccccccgactcctggtttctctggaagcctggggttccaggccatgcaggtagagaacaacaggtttaggacaaagtcattgtggacactgaggcccagaaaagggacttgcccaaggccacacagcaggtggccagcactgtgtccgtgtctctgttattccttcctctgcttgctttgggtttattttgtgctccttttctacttccttaagatgggagcttcagtgatcaatttcagatctttcctctcttctaacaagcatttggtactatgaatttccctctgaatcctgcttcagctgcatcccaacttctgataccaggtaggagtaattgttctaagctccgcagctgactacagagagcggccacatttgagaaacattctcatctctctgatcttgggtctctgacaatggagctagcaacacttcctggttttaagggctctgaggagcaaattagactgtctggtggtgaagaactttgtttaggaacaatttaagatgccaacaggttcatctgctctcctgcctccttctccccaccttgtaacacaccctagacaagtcagcactcaagtttatatggacaaataagcaagtaaaattagttaggaaatcaaatattggggttggggaacaataagagaaggcaagccctatgggatggtaaactgcagtataaagccccatttgctggcacagtgtggtctggcctgtgactaggtgagggacagtgcggggtggcctgcctgcatatgccaggttctgtgtatcacatctctcaccaggaaggcaaaacctggcagatggcacccgggcctgatggctcctcaaccctctcagcaccccaaagagggaagtcccatcaccctcactcacccagccccgggctggccctgtcagctctcgaactgcagcatacccgagctcttaaagcacactggacctagggctcaggtttgagctttcatgatgagaccctgaggtcactggcggggaaaatgagtcactggggcattccccgaacttgggaaaagccctgaccccagaatcctgagcctaaattgctgccaagttcccgatttcccttccagtcctcagtttccccttctctccggcaccctcctgaggaccactgagccccaaccaccaccatgcccatggctggtgcccaggaggtgggagctgtggagctgcctccaggccttcccggaggccccatggctgtcttacttggtttgtggcttcccagtaaacggtgggacaggaccagggtctgaggaaaagcaaagcagtgttgacagagtgtcctggagggcagcttgtctccctggcctggagatgaaaactgaagaaaacaagattccgtctaggaatcgtccagggcgcggcagcccgccaggagcccgggcagcttggatggggtccctgtgggcacaatcggcccagtgtggggcgcaccgccccaggcaggctggcgtcccgggggccagaatgaatggaccctcactgggccgctttgacagtttatgaggtgatgacgttgcagctatgattgatgaggtggcctcagtcggcgtttcggggaaccgggtacaagttgctagggaaatacagggggagggtgctgccctccccactggcccgctctgggtccctgtgctatgcctcagtctccccatctgtgtggaggaactgatgaagacagcacatgccccctgccctggtccctggattgcaagtccagacagaagagagcgtcctgggaagccagctgagagcacctctttctctttgggtcctgcagcccgtgggtggcagggcggtaaccccatctgcccagaaccaggctgcgctctcgggagggaaacagactcttatcctcttaggtacagcctccctggccgcctcggatgagcatctgcccctcccgggcctcagtttccacacctgagatgggagaggttgcatcctaaaggccctccatctctcaggttgggggatcactcttgtttccctgcagttgtttccagcattagagtcacactggggtccttgttctagcccccgtgtgttggctgcatgacccgaactttactcccatgtcctcctcttgggggtgtgacatgaggtcttccccaagtggccccgagtgaggcaccaccatggacctgatgggcagatcccccagggcactctatccagagggtggtggacccaaacgcgacgtccccagtggcggtggctgaggagaggggttggggcgaggaccagctctgggcagtctccaggtcatgcgcgtttgacgcaggaggttttgccggcgccaggggctccctcggctgaccgagggtgtcccttactccataaggtactgatatggtctgcggagcaggtggcatttgccatgcctgccctgcttgggtatttggccccagggccagggctgtccctcccacagctattgaacaccaggtccttgctgcgtctggctgggctgcagaatacccttgacctttcagcatcctcagtacctctgtggagtgctgccatgaccaaactagagactgttattattacgcacattttaagacagcatcggccggacgtggggggctcccaccagcactttgggaggctgaggcaggcggatcacttgaggtcaggagttcaacaccagcctggccaacatggggaaaccctgtctctactaaaaatacaaaaaaactagctgggcatgatggtgcatgcctataatcccagctactcaggaggcggaggcaagagaatcacttgaacctaggaggcagaggttgtagtgagccaagatcatgccattgcactccagcctgggcggcagagtgagactccatctcaaaaaaaaaaaaaaaaaaaaaagacagcatcactgtagccaagggaacttaaaagaaaaaagtgcatgtttagacagttgttcatttcctccagtttcctgccagcccccttctgtagctgtgggcacgtgcacatataagtcttctctttctcaccctgctcattgttcatagctgcataatattttacagagcagataaactctgccggccttaactactcccagggtcgaacgtctccttttctatcgtaaatatctctgcaattcctatagcttttttccttcaattcagtaaactttttttttttttttaatttgagatggagtctcactctgtcacccaggctggaatgcagtggtgtgatctcagctcactgcaacctctgcctcctgggtccaagcaattctcctgcctcagcctcctgagtagcttggaaaacaggcatgcaccaccacacccggctaatttttgtattttttagtagagaggggtttcaccatgttggccaggctggtcttgaatgcctgatctcgagtgatccacctgcctcagcttcccaaagtgctgggattacaggcatgagccaccgcacccagcccctttgctcttcctttgtcttctgccatgattgtgaggcctccccagccatgtggagttgtgagtccattaaacttctttcctttaaacattacccagtctcaggtatgtcttcattagcagcatgaaaacagactaatacaccatgtcatttaatgaggctgggcctgcctctttctgatggaatgaactctccccaggtgacagcctctggtcccctctgcctttggagtgacttctcctgcatgggggttctgggcagggttggggggtgaacactggagagggatcagtcccagctctgttcttccccacccgctgcaacctggttggggacgcgaggagggcacccagcaggctgccagggggaggaggagggactgcagtctgggcccagagcccggttgtcccccatggagccacacagcaggcacctcagagtttgcatccattggagatggccaggagtctgctcgtgtgggaagaatggcttctgagcgccaaggtagcctgtgctggagccttggctgccatagaaggccattcacgtccctcacaccctggcctgtgctgctgggaaggctgtcactcctaaacagttatctgcttctgtgttaacctacagggattccctctttgctttggctgccagggaactcaaagctaagttttttcgctcacattcccaggcttctggtgtagatatctcctttcttccttactgtggtttctgagccatctggtgtagatatctcccttcttccttactgtggtttctgagccaccctgcaaacttcctctgcatctgtcccagtacaaatatcactgtgtgcccttctaggctatctgggacacttaaaaataaataaataaagacatctgtctgaggcttaacttgcatatagcaaagtgcatgaatctgaagtgtgtggctgatgaatctgtacacaccgctctccctgcacagccacccagatgaagacgaggagcacctccaatacccaagcctccctccacccagtcaacactcttctccagagggagctagcccgtgccttcacccccgtcttctgcctgacggtaaacttgaggtgaatgggctcctacccatgaacacccaccgttcatttcatccgtgttgttctgtgcagccagactccatcctacggcatccgtgggtgatgtttcatcacgaggctggaccacgatgtgtttatcatgtcactgttgctgtcacatgggctgtttctggcttggggtccttatgaacagagctgatcagaacatatctgtccatggctcttggtggacatagcctcatttcatgtgtgtgactcaggagtgaggttgctgggtcccgcggcattcatgtgtttagtgtaggagactcttgccaaacatttctccagagtgtctgatgtaccatgttgcgctcccgccagcctcgctgagttcccatagcaccatgtcttctgcagcacacgatgtggccggacctctccacgctggccattcaggtggacgtggagcggtgtcatttccttcctgaggggcctgcatgaatcccttttaggtggaacacacacagagtgggccggcgctcataagcagtcccgtgtgaatccttggagagctgtggaggtagcacagctgcatctctaggttggggccactcttttcttggaacaagagccctaaacgtgggaccctaaacaacacccagggaggagcagcctggcctatgagcagggggacaccatgaagctgggtggacgggtggggaggcccgactttaagggacctgcttcctaagcaaacaggccaggacagaggctgcaggtataagccctgccctgccaccatgatggtgaatatgaggtgtcaacctgattggattgaaggatgcctagatggctggtaaagttttgtttctggctggttaagtgtgtctgtgagggtgttgccagaggagactgacttttgagtcggtggaccgggtgacggagacccaccctccgtgtgggtgggcaccatctcatcggctgtccttgtggctggaacaaagcagatggaggaaggtgggaagactttgtttgctgggtcttctggctttcatccgtctcccgtgctggatgcttcctgctctgggacatcagactccaggttctttgacctttggactctggtttagctggagctctcgggaggtgtcggcttccctacttttgaggattttggactcggacttggccattaccagcttctctcttccccagcttgcgtacggtctgtcgtgggacccgcctagtgatcgtgtgagccagttctccctaataaactccctttcatgtatagacatggatcctatgagtcttttccctctggggagccctgcctaacacagtggcatagagctccaggcaggcccctcacctggccttcagcttcagtttctttgcctactgggctgaatattggtgtcaccacccaggatagcaagtccccatcagtgtcactgccacctgtcgaagagatcccccagcccagcactcgggtctgtgagtggcagtggagatgacactaggctctaagtagtggggctgcgtgactccagcgcccctaggaccagcaagggcacccagagcactgtgggaggactggtgccgcctccctgcccccctgctttctcctgggccactgggctagacatggggcctccctgcccccatgtggtttggcctgaaaaagagaggaggtggggtggcacttctggggcagcccagagtgagtgccctgccctgagcccagcgtgtgccctgcctgtgcccctgggtggggggtgcatacagacctcggggggatctggccgttggagtgcgcactgggagggacggagtcagctctttttaatctaaacacacaccaggtgcttaacgtgtttttatcaaaatatcaagcacagctgcaagaggctgctctgctccaaggccctacgcccaggcccgtccctctgccaaagcgagccttttaggtgagccctgccggccacctgctagcccaggccccggctcctggtgggccctggaccaggctgcaagcatatccaagtgcatggcagtgagacgtccaggcctcccagccccaactctgagcctccgttgggtcagtggtaagatggggcagtggcacctacctccccggctgctgtgaaaaccaagtgagcggaagcatggcagcccctcaccaggtccccagtgggaggactctcaatgattggcactgccaggagtaatgttatgagaggagcgtcccatcagcctggaggggacacaggctgggtcagcacccacaggggcttccgcttctctgtctcagggggtccagggtggccccttgccactggtccccaggcacagccgctacacaggtgcctctgcagggtctgggagtcagctgtccagggcctgcttggccaccgcagggcaggagtgtggcactgtgagcctggtggcctggctgggcgtggccttgaggttctattgataaccccatggggaaagcccccctgaggtgcttgggcatcggacctgcccaccatctcctgaggtggggcctgctctccagacagtcaggtcagcatgagttcccatgaggccagggccagcacgaggaattgctgggagcggtccatccacccatccgtccgtccatccatccatccatccatccatccctatccacctgtccaccctgatgcagttcctgccatccacgtgtccatctgtctacccgtacacctgttcatccccatccatccatccccctgtccatccctgcccattcatccaccctgatgcagcgcctgctacccacccttctctgtccatccccatccatccatctctgtccatccatctgtccacctgtccatccccctatccatccctgtccattcgtccacccatccaccctgatgcagcacctgccatccacccttttctgtccatccccgtccatccatctccatctatccatctctgtccttccatctccatctatccatctctgcccatccatccatccatccatccatccacctgtccatccccatccatccatccctgtccatccatccactcatccaccctgatgcagtgcctgccgtccacccttctctgtccattcccatccatccatccatgtccatccatccattcattgcccatctgtccactcacccatccactcatcccacccacccatccatccacccatccgtccccagccatccatcctcctgtccatccctgtgcatgcatcatccttccaactgtctgtttgtccattcccatccatctatccacccatccacccaggcgagcacctgccatgcccacgacctgcaccatctcggtgaatctccatcgtagccccaggaggggctcttttcagctgcactttcaggatgagagaagggaggctctgagtggccatttgcccaaggtcacacagagctcagggccagcgcttcccatggccaaagcccaggccccctctgccagtcccgcctccaggcttgcaggtggagcagccaggggttccgtactccctgccaggcagctgccagccctccccgctcccctctcagttcctcagcctggctatgggaggcccaagtcccacgtgtcactggaattcgggaggcctggctctcaaagctttctgtacaaaacaaggagaaaaagagaagccacttttgctgtctggacatgctgtgggtgtcctggggaatgtgctggcccactgcttggggcctgacttggagtgcccaggagctgcgtctgcactgtggcttgaaccgagtgtcgtgctctgtggacagagccatccactctgggggtgctcgtcccatggcactgtcagcccccattctggaaggtcccaactgggtcccccaggcctgtgtcccagagaccttccaggtcttcattcactgatcatgcatttattttgggggtaggataggtcctgaagaccacagggcagggatctctgagttggggcttttgcggagtgagggagtgagagggtgttccaggcagaggaggtggcagagaaaggcaccaagtgaggcaggggcagttggggacatgagtgctcgggagcggggagagggggcagctggtgggtaagcagaggccagctccaaggcccccctgtgggccacattagggagacagggtctggccttgttggtagcgcggcccctcgcagtgatgggtcccctgtcagacctccaggatcctgggttgctggtttggcgcagccccggcttctgtgagcttttgtttctgttactggcacctgcagctcttcctaggcccctgccctggggcactggtgcctgcttcgccaaaggcacagagggctgcaggcgactggggcagggtggggggctcgcctcttagggctcagcttcactggccagaaacagggctggctcgatctgggtgttggcctgggtggggtggccagcatgcccacacctctcagtctggatgtggggagaggttgttccatccagggcagttggtctccagaaggaaattctctgtatctgggtgctgcaacctaggtgcccggggtctcacgcagtggggcctccccggaggaggtgaagtgcatgtggcccctcgtgctggatggagctggactctagggaggaccaggagggtgagctcaggccagggcgccaaggccctgagccccaggggcctgcctgtctgcccatcattcctccactcatggggagggactgccccccagcccagatttctaggagggccgaggctcacaggaagccaatgccaggcgataacccacagtccccagtggtcagtaggaaggaggctgcctgcttgtgtgctcattaggagccaaggccatgaggccactaacggaatgtccctgatctcagggatctcagtgtggaggtggcagcacacaggtaaccaaacaattgtggcagattgatgggtgctttgatggggtccacacagttaccgtggagtgcagagtgggcacctaactgaggaggcaagggttggagggaggaaggtttcagggaagacttcctggaggaggtgacttgttcttagggaatgaggcccagggagctaaagctttagggcagggcagcagattcagagacacccccaggggtagggggaagtgcactagagtgacgtgtgcctggcgtgggaacagggagacattagagaatagtgggagtgtggcaggctgggcccgccttgcccctttcaaggaagcagctgccgcgtcacacgctgcagcgcagtgctgcccatggtttgtcggcccatattgtgggatctttcagattttctcaagaagccaggtttccagctcctaggtttgaaaagttctatgtgcgcttgaccggggggccttacgtacgtgaattgggtgagggcctgagacaggcgggtgagcacttgccccacactccagccaggattgggggttcaaggtaccgcatttgccacgtgagggagtctctggagaccaccaacccgctggtgggcggccaagcgtcaccaccagtccctctcagtgcgtcccacctctgttctcagcccctgcggtgcccgcagtcagtggggcagtgagaaccgcgcaggaaatagctggcgccatggtgtcggttctggttgacagagtgccacctggctaaacccagccgtaaataagccccgtttcctccctgtggacagagactggtgggtgccaaggttcacggcaaaaacccttccccgccaggccccactgctctctgcctggctggcacacgcccttgcctcaggcctggctccccgggtcctgttgaccaccaggctgcagatcccaaggaatgcaggcatctgggtggccccacgtggagcaccagccatggggaggccgtgggctaccaggccctgcgtgcactcgcagcatgcaccactccttctccaggtcccgttgacctccatgtgtgctgtgccccgtcctccgctgcactgcctcttcgtagtgccccagctccatccgggggtgggtgggagtggagacccctgcctacaggcctccgggtctagccagagtcaaccagcccaccagagacacccagatgcaggctatgccccacgtgcccagggaggatctgctgacgtgagcccagatttcgattcttgtgcgagggagacgaaccaggtttaaaccccagctctgccacttctggctgtgactttgagcatggctgttcatctctgggggtctctctcctcatctcagagaagcagatcatggtgcgcaccccatggcgcgctgtgcagagcacatagagacgccacccacagctggcttactgcagaggtgtgggcccattgtggtatcgctgatgtcctggaggccacaagtctgctagctagaggagcctcacctgcatcccggggcctgcccactggctggtggagagctctgggttgtgggcagcaggcaggcctatttccagtgagtctgtggctcctgggggtgtgtgagaccttgggcagatcccttcctgtgcctcggtttacccactagggctcagagccctgggggactggctcagtgagtgcctccttctgcgaggagagacttttgtccttactagccagaggacaggtcagccggggcaggctctgggccctgggcaccacccactggaaggaaagggggttcagttagcccagccctgccccccaatggaagaaaattggggttcagttagcccagccctgccccaccccagctcttcacacatccagatccagatgggggccagaccaccaggagactgtaaggatccaaggccgaggggcaggagacgcagtgcgcccctctcctatttctgggttgcaaccgcccacacatgtgcacacagggaagatgtctcttttggttggggggcacaggaccccacctcactcttagctctgagacacccttgtcaggcctcctggacaggtgggagggacagggcagggtggggtgtggccagctgcagtccctgggaggggtactggggctgggccaggccagggcaggacagagttggggaatccaggcccctcaccattgccctggctctttgtatgtagtgctgcctgcgggcggcagcctagctggacacctgcagtgcgctcatgcccagcctctgtgggtgtctggctcaccccacgtgggaggaaggcgggcacgggtggtttgggctgggcaggcccagcccgggtgcacagctttctcatccacacacacattccatgtgtaggggctcagggggaggggtcacctcctccctccccacccctccttgttacagaggagcagatggccaaacggatgggggacaagcacctgacagggccactgctcctgctctcagctgggccagtgggaaagggagcttggcacctccaagggaggtcccagccaggggaagtgtgtccccatccctgctctggtccccaggccagagaggtgagggacccagagaggcccaggatgaggactccttcagtcctgggtttttgtttggattttttttttctgccaagtgacttcaaagccgcccgagaaggtcctgtatgtgtgagcaggttgggcaaggggagggcgggtctccaagctgggagcctcctcgcggccctcgcctcggcactgatgtggccctggaccctccggtccctccaggccacccttcgtgccaggacccagctggcttcaatggcaggaggtgccctgggctggagggtccccacgctgggctccggggctccaggttgactcagcagtccccaggcctgtgggcagagctggcctgggaggacacgggcctgagggctgagcaatccctgagtgagaacaggtagctgaggctggagcctgtgtcccccaggcagctgctaaggcccgggcctggggctggagtgctgggctcaggtgccatgtgagctctttgcaggcagggaccaggtcagagtcctttgtgtgcctcttgacccccaggtcctgggagaagaggggcttgggaggccttggctggatgcacaggctccatgggaaggagctcctgctcgggtttctttgtaagcagcacgacatggcaccttcccagaggtacatgggtctgggcatgtcattccccgacctgcttccagaacccaggggacggaggtcggagcagcctgcctgagatctgtggccatctccactccgccacccagctaccccgtaaggaggccaccgaccctcgggcacctgccagggacccagctcaggccaggtcacgggctggatgtgggatgttctgggccttctgcccacctcactgggccccagcaagctgctgtcctgagggtggccgtgctgggccagcacgtggacagcagggaaccccatgggcacaggcctagtgtgtgtgatgtaccggtgcagaccatctgataagcagccttcagagaagctgcgggtgtgcaggtggaggcagacctcccagctgcatcctccaggcacttgccagggtcaggctctggtgaacacccttctagaaataaccccccaggcccccgggggtcttgggctcctggggttctgatggaaggatgccccttgcccggcctcactacctccacctcatgaatcaccctctgtccttgtcctgcaagtctgtcggcacagccgagctggcgtcaccctctgatgccagtgcccagatccctgaattcactgggcagccgccccctgcacctggctcccagccactgcctttccaaagcaaatggggacagggatacctgcccctccctgggtaggcagctgttgcggcctccagttgtgagagtctctgccccaccctgccccttcccctgcccctgcagggtagagaggaggcgggtgggccaccgactgggagtcccgggcagctcaggtccctcaagagcccctcggggagaggccgcacccgtctcccttggtcagtgttccccaggaggcggtgctggcctgcgtgtgccctggaggaggcggcagggagactggcctcatggggctcttttgctggggcctggccaccattttccttcgattggtacaaagactgtccctgtgaagctggccaggccccaggcacagaaccgccttgttttctgcctctcactcacccgttccctgcattcggctgacagagcatgagggggaggaatcactgatgacaggcactggcctgcccagctgggggcctttgtttattcatttggtgggcacttcctgggtgcctgctctgggtcaggcctgtgggggggaccaccgagggcaggaaacctggcctgtccctccaggaagcgaagtcaacactggcacctgcagatgaagtggcagagcagcccccagctttgatggcatggggtggttggagggcacattctgcatgctcagaagagagagcaactcgccctgtggaaggagcatacagtgggagatggggacaggtgagtggggtcttgaaacgtgaacaggagtttgcaggtggagcaggtttcaagagcattccagggcacagcatgggcaatggcagggagagctgggatgtctgaagagcagcagcccagacactgagtggctggcgaggcgagggaggtccgcaggtggggcccagtcaggatggactcatctgccatgctgaggagccaggctatgatgtgggcaatagggagccacagcagtttacacaggggaggcgggagcagctgagcatttagggaagccactctggctgcaaaagaggagagggggccaggcaggagggagagccagtggagggggagggggaaggggaagggaacaggcttcagcagaagacctcctgccttcaaggggcccgggtcaccctgtgggttccggtggttaaggccagcctcctggtcctgcagccacatgcctcccagctgtgtgcctccgcttctacctccgaaacccgggcagcaggacccaccctgcaggctcctgcgcaaggatgggggaggtacctggagggcccaccccacatcagaagcaggtcctcagccagagacgcccaaatgcagcccgagggaggctgcccccaggagaggagaggagaacccgcagccgccccgcaggcgcctggggaaatcactcactgctcccacctcccagccaggccccgagggccaggcactctggcttagtgaagaagccacccagcaaaggcctggtgtctccacaccattctcggggggacagcagcaaggacgatggacgggagcagtgctcagccttaacgtccctgtttccggaagcgtccctgccccgctcagtcctgccccactccctctcccatcagtgccctcagactccaggcccttttctttctttcccagcagtgctgacaactgtgagtgtggaactggactgtgaaccctggagggcagatggtggaggtgggagggggcagggccagcgccagggtgagctgcagggtccccaggtgcaggggaaacgccaacttcgtgtgcagtcttgcctcttttgtttcgtttcagagtggcccccagagccaagccctatgctaccttacagatgaggaaactgaggctcgggcaggtgaagagaccggccctgggccatgcacttttttggggacagagcagggtgctcagctgtctgggggcctgggctgggcctggggcagggggaggagcagcgctgtgacccccacggggagccgtcagccaggcccgtagccagggaagggcggaggggcttaacgcaggcccacatggccaggacacagaaccgtgggggcagccccagcccttccctgcctgttacaggcccctgcccctgttcctgtgtcccatgcctgtcccctccctccatgtgtctgtctctactcgcctgccctctctctgccctcttttctctgcttcatcctctttttccgtttctgcctgtctcatggttcttcctgtccctgccctccctccctccgtgtgtggccgtgtctctctgtctgtctcttcctcctcctccagctctgtcccagtagggccactccgggcaggatggtctgcggcccctcctgcttcaccctctccgctctgtacccactgccgaggacacacctttgctgggtttcttggttcagcttttgtaccgtgacatctctgaggtccacaggtcacagggcactggccagtgtggggcagggactcctcctgcccaggccattggacaaagcagagctgcttcaggggctttggggccaccaggccaggaacaggtcccctcctgcctaccccagctccctgggagacacagcccacagcagcgtcacgtaattaagacataaaagtccacgatttccgctgcgtgtgggcaaacaccggccgggtgctaatgcaatcctttcttttagtggattcttgaatttaaatgatatgtaattaaacataattagccacggacgccattcggctaggtacacgtgcggagtggggctggccggattctcattacaaagcgtcatcttctatggggagacctcttgttccctctcggggctggttgcttttgcctggacaataagcctggccccagggcacctggggaaggtgtccaaggagggggtcctgggggccagtcccccgggggctcggatgatgaatcatgggcggtgtttgctggaagaatttttgttccgcttcgggcaacaaggaacccaaacctctcactgttgtggggagaaaagttggaaatcagatgggaactggctgcggtaccagagaggacgtcagacccgggccgcggcctcagcccccgactccttgtaagcgtgggctgggtgcacacgtggcggctgcgagcagtgctttggagctcatctccccagaccctagtgggagctgagggcagcctggcagggctgatgcaggcccatgcacacaggccaggcagaggtgagaccagggaatagaagcgttgcaggggcagagggcaggagggggcagagcctcggcgtaggagtgagcctactggtccttcccgcaggcaccctccctagtgccaggtctgctgggactccaggctgttggtatgccccctagggtcctgcttggagcctttctgaccctcctgatccagtgcctgtgccgggcttcctccccactcaccctgtcctccctgtgccccatgtagcccacacatcagtgtgtccgtccgtctgcctgtctgccccccaccagcctgtgtgcccaggggaaggctcaaggccggtcatgctctacctccctggccagcccagccccagcccacggtgcattccctggacaggattgctgagttttccattttagccacaacagcgcccacacccgcgccaaccaacctgtccttgccacgaatattggctcctgccctcctcatgggagcccatggtgcatgctattatgacctcggtctagaggcagggacaccaaggcacaggggcttagggaagttgcctgaggtcacgtggctggtagggggcggagccagctttatcctcatggcacagatgaggaaactgaggcagagaggtgttttgccagggggctgatttactgagctagccagccgttctggttttgtctctgtctcgctcagagggacccccaccccacccacctgcctacccagcttgccgtgtcctcggccagggccagcagtctcagaggtagagctgctgagagaagcctgtcatctgtcctccaagagggatctgagtaagccggagagcatcagcagcctcaaggggaccttggacccctgcccacctttcattctgtaccagggcagggtgtgtctgcacagcctggagccaggtgtggctggcagccccaggaagacagggccaaccctgcccagcccagagcagccgcatctctgcagcagcggtgcacttgagtggaagcactggcttcccaagagtaagagcttgagaaggggcctgtccagagccctgggggacggtggacaggccagcccaggggtccaggcctttcctgtaggggccgaatcgttaccacttcaggctctgccagcttccatttggtctctcttgcatattactctcttctttttacacccctttaaaaatataaagacaggccgcaggtaggatttggccctctggcctacacaatagcaactgtgagcattatatgtggcttctctttctttttgagactctcatctgtcacccaggttggaatgcagtggtgtgatcacggctcaccacagcctcaacctcccaggctcaggtgatcctcccacctcagcctcccaagtagctgggactacaggcgcctgccactacacctggctgatttttgtacttttttgtagagatagggtttcaccatgttgcccaggctggtcttgacctcctgggctcaagcaatcctcctgccttagcctcccaaagtgctaggatgacaggcgtgagctaccacgcccggcccatatgtggctttttaattaaatttttgaggtataacattagtaaagtgctctaaaagtgaagaataggatgttagccccacccaggtcaagatctagaacattcctggcacccctattcacctttccgttaggaagctgccgtcccaccctctgtcactagtctgcctttgccagctctggagctctctgtaagtcagtcctgctgtgtgtattcctcgagtctggcctcagttgctcttcaggtctggggctcacccccattgccgcggcaggaactcaccccagattgagccgttgtggagtattccagtgtgcaattctgccgtggtctgttttcccatcctccccctggcgggcatttgtccagtgtttgacttttgctattgcaactaaagctgtgtggagcagtgtgcctttggtgaacgtgcctttggtgaacgtgaggatgcatttctgctgtgtacatacttaggagtgggactgcagggttgcaagtggatatcaacacgcagttttccaatgtggcccgtaccatagaaggcctcgtggtgatgccgagtccatattccagcactgacgcaggattgcgtggtgccaagtccctatttcagcactgacgcaggatcacgcatgtcttcaatgcccctctcctagatcgtagacaccctgtgtggcatcacagaatgacacacacaagacaagaggcctctaaagccctgacactgacacgggttgttcttgctggggttgctaatggagcgggtgcgggtgtgggtgcgggtgagggtgctgatggagcgggtgagggtgcgggtgagggtgctggtggagcgggtgagggtgcgggtgagggtgctggtggagcgggtgagggtgagggtgagggtgctgatgcagcgggtgagggtgagggtgagggtgagggtgctgatggagcgggtgagggtgagggtgttgacggagcgggtgagggtgcgggtgagggtgctgatggagcgggtgagggtgcgggtgagggtgctggtggagcgggtgcgggtgcgggtgcaggtgagggtgctgatggagcgggcgagggtgagggtgagggtgctgatggagcgggtgagggtgcgggtgagggtgctggtggagcgggtgcgggtgcgggtgcaggtgagggtgctgatggagcgggcgagggtgagggtgagggtgctgatggagcgggtgagggtgcgggtgagggtgctgatggagcgggtgagggtgcgggtgagggtgctgatggagcgggtgagggtgagggtgagggtgagggtgttgacggagcgggtgagggtgagggtgagggtgctgatggagcgggtgagggtgagggtgagggtgctgatggagcgggcgagggtgagggtgagggtgctgatggagcgggtgagggtgcgggtgagggtgctggtggagcgggtgagggtgttaatgaagcgggtgcgggtgagggtgctgatggagcgggtgcgggtgagggggccgcatactcatccccttgcctggtcccccaggctcctactttggtgtgtgctcattcaggagcagcagagtggccgtgcttgggacggccagccaagcgatccccactggtactggcatctgtaggtgcccctgcttggagcgggtgctggcaactgccctttgctggaaggggcagcaatgtccagcagtggtggaagctctcgaaagaacacagggctgggagtagaactcagtcagatcccagctctgctctccctgctgtgtgacctatagcaagtctctgaacctttctgagctgtttcctcacctgttcaagatgggggtgaccacttcttccttggaggatggaagggagagggatgtgaggctcgtgagtgctgtgctcggagactgtgcaggaggggaagcggccgtagccccatacaagcaggtgggcaaggaagtgggggcgctggaggggcttaggggacaaggggttctgtccttgggacctggacaagagccaaaaggtataccctcacagtcacaggggagcccacactgccctcccctcccagggactgcccctgtggcccccgtccaggtccacagcctcagcagtccctgagggccaggaggtagcctccaggccactgggctgagaacccttaaaagaaaaagcccccctgcccatgacagtcattttagggtcaagaaagccctttgcagaaaccaaaccctttgaaagggccaacacggcttttagatgacgtgagaaccaacttcaagcacttcctctcagaccagggtggcagcttccaaagtgggggcgctgctgccgggagactgtggtttccctgcttctcagggagcttgggccaggccgtggggagatccaagcaacatgtccctcggtagtggtaggtttgcagacgggccgctccccacttcctgccaagctccagcggcacctctgtgggtgcaaggctgtggggaggggccttctggctcacagccctccaggctgcccacagcccctaggatgaggtgccacttcctcaaatgactgtcaagactgggatgggggccgggcacggtggctcactcctgtaatcccagcactttgggaggctaaggcgggcaaatcacttgaggtcaggagtcggagaccggcctggccaacatggcgaaaccctatctctacactaaaaaatacaaaaaaagccgggcgtggtggcgggtgcctgtagtcccagctactcaagagccgaggcaggagaatcgcttgaaactgggaggcagaggttgcagtgagccaagatcgcaccattgcactccagcctgggcaacagagtgacacttggtctcaaaaaaataaaaaataaaaaaggctctggatgtctccacgaacccacctgaccccttcctgctcctggggctctcctctcccacccacgtgtctacccgtagctcctgcctgccttcaggactcagcccacagccccttccacaaagtcccctggcagggcccggaggcctctgcactgtctcatggcttcattcctgtgtcctcagcatccagtgagacctcaggagatgcctggggaatggctgaaggctttggagaggttgctgcccccagaatcccagccagagggcagtttatccaggagcccggtgcctcctctgttgggtgggcgtggcctcagagggcaccaaccagaagacacatgctgtcactgacatgcgggcccccagcgttagggcaggcaggagctccgagtctctaccccagctgtccccacagtgcacatggactaggctcctcccacggggcactaggccaggccaggggtgtggggtgagcccctggggagcccagagcagggtacactcatgtccccaccatccaaggtgagatgtctgtgctggaggcccagagggagctgggccggctgtcactccaccacaaggctgagcaggctccccagtgggagacaggtttggggaggtgtccaggttgagggcacagtcaggaggggccatgtgtgcctgagtagggcagggggaggagggggatggccagtggccacgggccaggctgcctggcaggacctggaggtttcctcaagctaaggccaggcccatgttagatgctgggagggtgggtgtggctgcagaggggtcagcgtgggggcactgactaacctccggccatcctctccaggcccagtgacgagcaccatccggaagtgaaggctgatgggtacgtggacaacctcgcagaggcagtggacctgctgctgcagcacgccgacaagtgatggcctcctgggagagccccgcctcctccacccctgcctctcctccacccctgcctcccctccacccctgcctctcctccacccgcccaggagagccccacctcctccacccctgcctctcctccacccctgcctcccctccacctgccccagtgcccagaccaaccaaggccctgacagccctgccttctgccctctgccctgcatgggcaggcatttgttccctacctgggtggcctgctcccctgcctgggccctgacttcagctccctgtagtgaagtccaggagggtgggacaggcctgtcaggcctctgggaatctcccaaatcccagaactcaccactcaccatgggcctttaaatgcagtaaactccacctaaccagattcaggggcactatgcccactgcctcctcttcagactctttgcatttcagtgaagagcctggaagaaacccaggggcctcctatgcacagatcttgcagcccagaaccaagtcagcctccctgcgactgcccaggcacactgcccaccaccccacccccgaaacaatgccagcccgctgctttttctatcctcccagtcacctttgcagacaaagaccaggggcagctcccgagggcactgtgaaggctcccatgccacacagtgagaactgtagcctctgcgtccaaggcacacagggtactttctggacccactgctggacagacttgaaggtgtcatgcccggtgtgtgcaggaggaaactaacagttcagtaaactctgccttgaccagcagcctttgactcaggctttgactgctaggaagaaccgtatgggggaggccaccagcagggtctgggccactgtctctagtcctgccttatgcttgagccactgaatatcagaggtgcgagggacaagggccctgaaacacctcacctgctccagccccttcacttagcagatggggaaactgaggcccagaggggccagtgagctgctgttggccctatctggaacgaggcagtccagggcaaactttggcactgccttccctaacggaacagcctgtggcctgggggtggtgagctttgctttcccgaccaagggcgcggcggccttcccacaggggccctgggaacaaatcactcataactgaagtttcaggtttcagaatcagtcagctgaacagataacttgattgctccatttctccccaaatcagttcagaagctactgataacccttgagagactgcttctttattttattttattattattatttttgaaatggagttttgctttcgttgcccaggctggagggcactggcgtgatctcagctcactgcaacctccgcctcctgggttcaagctattctcccgcctcagcctcccgagtagctgggattataggtgcccgccaccacgcctggctaattttttgtatttttagtagagacagggtttcaccatgttggtcaggctggtctcgaactcccaacctcaggtgatccgcccacctcggccttccaaagtgctggtattacaggcatgagccactgcgcccggcctggagagcgcttcttatgagagaagccatgggtctccggagcaggatttccaccacatgaaggtggacgataagaaagtgtgggacccacgccggggaggggcaagtacagcccccgcaaggccgcccattaaatcaggattgggggaaacggtgacagtcttttcagcaagatgagaggccaccagccgggccagtgtcactggatttgagggagggccatttggccccttagttggaaaatatgcagatggctggctccttgatggagtcccctgatggcagctccttaggagacaatacaggacgttcaggcggcggctgcagttcagtggcagcctggaggggctgtgcgtgatgccgggctgtgcgtgatgccgggctgtgggtgatgccatgctgtgcgtgatgccgggtttgtgggtgatgccgagtttgtgggtgatgccgggctgcgggtgatgccgggctgtgcgtgatgccgggtttgtgggtgatgccgggctgtgcgtgatgccgggtttgtgggtgatgccgggctgcgggtgatgccgggctgtgcgtgatgccgggctgcgggtgatgccgggctgcgggtgatgccggggctgtgtgtgatgccgggtttgtgtgtgatgccgggctgtgcgtgatgccgggctgggggtgatgccgggctgtgcgtgatgccgggctgtgcgtgatgccaggctgtgcgtgatg

SEQ ID NO: 316 - DNA, 24553 bp, Homo sapiens
  source 1..24553: mol_type = genomic DNA
tgtatttgcacacatgaacacaagttcatgtgcttgggcattacacgcatacatatatttgtgcacacatatatttgtgtgtgaaagttacttacacacgtgaaaaacatgatttcatgcctcaactctgtaccctgtgaggtaaaccgcaggtcctgactatccccttacctgtcctggcaaacaagtcatttcagactgacacccgccttgtccctattagacggagccaaacctgcctccgaagcagacccagatgggactctgtaaccgaagtgcttattcagtttttgtctacaatcattttatttcctaaatccctcccccaccagacacctgggtatttccctccagtccccaggagactctagggtgagcctgaaacctggaggctgggggtagcagttgggatttacccagcacgctactttgttggcccctggggaggtggtgcagccaggcgggtaaggaggactcgcgccatcagcggggtctgagacatggtgtgcccagtgggcagagaataggcctgtggtttttaagaacctcactgatatcgaatgtgtcttggagtgagaaagtttttaatggaaaaggagcaagagagagtaatgaaataatttgctaagtgcctactatgttccaggcattttacatccacagtctctttcaatcaacacgtccatgcggaggagagcttcttgtcgcccattataaaggtcagaaacaggctaagggaggataagtcactgcctaaggttacagtgcatgtaaatggcagagctaggattcgaaccctggcctttctgagttcctaaagccatgctcgcccccactcttccaggctggggagagaccgggaagagcgagaagctacacgctgggctgcagattgggccctagcgggcttggagcgtggatatgctggctggcccccctccccgggagtcacagctctcgccggtctcgccactcaggctctgccgggtacccaggaggcttgcacggccgcctgcagcccgctgtgcagagcccgggccgaaggcggagctcgatgggaaacggccggccgaaggctcttgcaactctgccacaggcctgccttcccgggcctcccaggcgggtgcctgaggccgcggctccaggccgaggggagaccgcagtgagacgagcatccccttgctgcgccttcttaggatagagggtttaattttcctttctgaagatatcgcaggaagctgttcgtatcttaaaaactccaaaccccgcgctctccctcctccctgcctcccccccacccccgccctccagcctcgcccaccagctcccaccatctcgactctcctctgctcctcttgcctctcccctccctcttgggtctcccgccttcccggagcacgcgctgccagggcctggggcgccgagcggccaatggcacggcggcaggacgtgatgtcaggcgcggctgtagaaaaggcgcggaggcttgcgctggcgcggactgcagagccggggctgggctaggcgcgcgcttggagagcattgcgcgcggctgggcccgcggccggcggctcctcctcccactctgctcctcctcttttttctcctcctccacctcctcctccgcctcctcctcctcctcttcctcctcctcttcaattctcccggtggctcgactcggctcgcaggcttcggagaaacccctactccagtcgccgactcagcgcccaagagggtcgccttgggctgggggcgcaccccagggaggggaggggtccaggcagctgggccgccgcggacacctagcggcttcagggtgaaccccgaccgcagccgtcgccgcctcgggcagagtttgcgcccttgctttgcgccccgggcgctgaagccgggcgggcgatgcccgcggcgtgaaagcgcccgcggcgggcgccgacctctgtcctagtctcctgctccccccgccccgcttgtcccgtgcccttgtgaccctggctttggcgccgtcgcccaggcgccccgcaatgtagctgcccctgcgcctcggcgggaggcgtcctgccccgcgagcgcccggggcccggagcccggcctgggggctcagccgagctcgggcggggccggggccgcggtggcgatgcaccgggcccgttagcgccaggagcgccaggcagctgaggcggggggcaagccctccctcggaggagccgcgcccccggccccgccggtcccgccgcgatgctgttccacagtctgtcgggccccgaggtgcacggggtcatcgacgagatggaccgcagggccaagagcgaggctcccgccatcagctccgccatcgaccgcggcgacaccgagacggtaggcgcgcggctgtggggtcggggctgagagctgggatggggccgggccagtcagcgcctctgctccccgaagtttggggagcgtccttcgtgccgcacgggactgggtgctggggatcctcggtcagaatgcaaggccggtggctcccggttcgggggaaacccggctgctgggacgcagaagggaaacaaggttgaaaccgaaatctcggccctgggggtagaggagagcgtttcttccgaactggaagcgaagtcccatccgcggcccggggcggctcccttctcaccttgcccggtgccggggtcgacagccccgcgctctcctccacctctcggctccggttgctggcggcgccgcgagcggcgccagggaagggcgaaccagctgggagcattggggctccagccggcttgggccgctcccagctttccggcaatcggggatcctcctcaacccccagcgcagtttcagaggccgaagtcttcggggccaacatttgtcgttgatcgcgtccccagacccttgactggtcagacttagccaggccagggctgggagttcaggctccggcctggccctcgccgaaggagactccatttggatctctacacctggctccgcgggcccagccccaaatagccagttcctcgcctcaggcctccctgggggccagacgagcagacactgcccgaccagcgggcccagaagtgacctttaggaggccgcggaggtggggagcacgggagaagcttctctgctccgggagcaggagcagcggcgccagtgtcctcccggcctctgagcgcttcttcggttagaccttctctgctggtcagtttggatagggaagtatttgggttgaacctgtccttcacccacggactttgagggtgtccctgcaccccacttacctcatccccggacccaagagggccccagcccgtgtggcagaggagccagaagttggctgacttgtcctggccttaacctctggtctaaggatccagggatcactggagctggggcccaggaactccgctgtctctccaaagaggattctgtgtggagggtgacttaatggtcaccttatcccccgggtggctcatttaagaagcagtttagggaaagctcttggagggcttgactggagtagctgtcctggtccctaaacacagcccgagcattttgggggaaaggacagggaggactggaaggaagagaggtaagcaccagagccatttaggccaggagcccggcctgggcccgtggctggcgagggctgcgcaggcaggcctgggttctgaaccgcccagaaatggaaatgggccttttggggtggggggaagcgcgccgcatgtcctggcagccccctccgcgttcagggtagccaaggccacagagggagttgtgggtgccggtttcccggcggcggaggggccgctggctgacgcaggcgctgctgtcttccgcctccctcccttcgcagaccatgccgtccatcagcagtgaccgcgccgcgctgtgcgccggctgcgggggcaagatctcggaccgctactacctgctggcggtggacaagcagtggcacatgcgctgcctcaagtgctgcgagtgcaagctcaacctggagtcggagctcacctgtttcagcaaggacggtagcatctactgcaaggaagactactacaggtagcccccccacccaactgcccctcaggacccctccccccaatctcaggcacagtcttacagtttggccctctcctttccgtttagtcccaggagagggttcactactcaggactcccccgctccccccccaagttctccaagccaccacaagttgggtgataaccttttaaagcagcaatttggggagctcttggaaaggtctacgaagtaggagaaccagaaaaaaagcagaagctgccctcctgctcggagcttagaccacaaaaaagcttgagttgggatccttgctcccctctctctttgaagtttcttgagttaatccgaggttatagaaacaggcacccccaaacctaggcagcccaagctggagtgaaacacagctggaaagagagctgtgggagtgggtgcatttccaggtcttttgagaaaatgggaatgaaaggtggccaagatcaaagaaccagaatcactagtagactccaagttctctgtttctccttctccccagttttaggattagggtctatgtatattctctctgtctctgtctctacgtctgtgtctctctctctttccctgtctctgtgtttcttccaaattataaaagtcagtaggattcccaggcgctggtttggagggaggagtaaaggttgaggagggggtaagtggtaagtgtctccctccactcccaggtaaaggctttcctagggcttgcggagactctgggtgaagtagaagtctctgtaggcataagtgtgttaagggaaactattttaggacaggaccaggcctgggtcaaaatctagttctctctcccccccatcctccaaataaaggccgggttgttcgtcttgaggaggggattgccccccgcagcagcagcggcacctggaggaggaaaaggggggtacccaaccgtgtgttcccacagcccctccctccatggtccctacaggcgcttctctgtgcagcgctgcgcccgctgccacctgggcatctcggcctcggagatggtgatgcgcgctcgggacttggtttatcacctcaactgcttcacgtgcaccacgtgtaacaagatgctgaccacgggcgaccacttcggcatgaaggacagcctggtctactgccgcttgcacttcgaggcgctgctgcagggcgagtaccccgcacacttcaaccatgccgacgtggcagcggcggccgctgcagccgcggcggccaagagcgcggggctgggcgcagcaggggccaaccctctgggtcttccctactacaatggcgtgggcactgtgcagaaggggcggccgaggaaacgtaagagcccgggccccggtgcggatctggcggcctacaacgctggtgagtgcgcggcgcacgaagcgcccccatagggttgggggaaagtgtgcggcctcgacggccgggagctggattgaatctctgtgtgctgggcaaatagcgagccttaagcaccggacggcctcgcagaagggacattagccccctgggcttccagactgtgcgtcctcggctggagcgggaggagagggtgcagtggtcccttgctgctccgggtgcagggccttgtctctgataaattgtttttttggagatggctttttggtttgggcctttgccccactttgctaggcaggaagtggcagggatggagaaagcaaggcggcgctgacgccaaacaggttttgggttggcgcggctgagggccgggaactggggcagcgaaggaacgaggcagggcggcgagggtcccaagagaaagggctggctgtggcccggggcgccgagctcggcctggagtgcggcctgacctcgtgaaatgtcccaagggcggcaggcttggggaactcgggcttggggaactcaggaaagcaaaggctgcggttccttttgctcggcccgatcctcctttaaagacaggtctcagttttcccggactttttcctccgagtttcctggcgcctgctggggtgagggccgtgaccctcggaagcgagccccccgggcggggacgagaccggagcaggcctggcctcgcgccggggtggggtggggtggggtgaggtggggggcttggttcggatttccggcatctttgaaccccaggccattcccggagaagctctgccccctcccgcgcccctccctgctcaggacagctgcagaggttctgagttccggcaaatgagccgtcaacatctgcccgaagtctgcaaggcccggaaaggtttatgactctccgggcttccgaactagagtttatgtgcaattattttctttctttcgtttgcaacagaattagatttggagattttgtgttcttcttccttttccctttagtctaatgcacaagcagaaaaaagcaaaaacaaaaacaaacccaagactgtgcagagggtgctacggcgggaagaagtcagttattttcatcttaaagaatctgagttgaatagagagggaaatgaggggcgggtgttcgctccaacgaaatcgcttggaggatcatggggcgtgtgtccctgtgtgcggaactgggaggaaaacgcagcccccagtttggtaaatggtgaagcagcggtaggccggtcggtggcgcggatttaagatttgctgaaggcactaccacagatgtagctctctggaacttccatccctcctctcctaccaccccccaaaaaaagacaaaaccgagttcagaccggctcccccaacaccaagccgcttctatttatcaagtgggtcaacttccactcggaagcacctcgcggggctcggctccagggcacctggtggctggggagctgtattgttttcctgggcacggaggttcggcgccggttttaggattgtgcaaaaagagagtagaaggtacagagatttatttctgctttttgctgttcagccgccgtttgccccagcgaggtgggctggaggctgaatttcaagccttgtttaacctctacaagagacaccctccattcagccatctcactttctctctggcctccctctctctttttttcctttccgttctctccgtcctttctctctatctctgtctctgtgtgtgtcgtgtttgttcccgtgccctcctctccgaccttggccggggctcctagtcctgagagaaacggcgttcggtgcgccggcggtggctatgcggctggctctttcggggctcccgggactaggttggggaaagagggcatctccccggcctctcggggcccagcccagtcttcctagatctggcgtccgcccttccctcccctcccgcactggcaggagagaaatggccgcagtgtgggccgcggggcagctaggactggaaagcggggaccctggagggtgcgatcgcggacggggtgtgcgggcgcgggtcgtgtgcgtgtgcgtgcagggttccgaccacggggacacgagcttgtttgtggcagtgtcccacatcctgtggcccagccacgacgaccccttgcaaagcctcttgctctggggacagtccctccgaggcgcggcggcaccttactgaagggcggcgagctgggggccgagtggggagggggcgccgtcggggcgccgggcgctgggcttacagcagagccgcgggccgcggggtcggaaagtccttccggggcggggccgcagcggcctcttcccgcagcccctcgggcccgggccccggtggaacggaaacctccccctaccccgggaggggctgccagcgggctgggggtgcgaaaacggcggcaggagcgggcgaggggcccgggccgcgcactttgcgcctgggtttgcgcgccgcggccgcgggagtcccgcgcggaccggccggacgcccggcctcccccagccccagctttttgtgtgtgtgtgcctggcggcgtaattactgatttgattccaatccattatttagacaattgaacctacaatctcgtctttagtaaaatgaggcgaagtcagatttgattacaggttcagtcccagcgacaagagctcgaaacccgatgggttaataacagatcacgagtaaattattcatgattttacgagctctttagctccattgaatcggcctaattgagaggaaaaaaaaaaaaaaggagagagaaagcccgggtcctccccctcccctcggcccctcgctcctccccggatccgatcctggggaatctcgacccgcccccgggcactgggggcgggagtgagggggttcggggcgccggccaaacctgggccccacggctgcctcccccgccgccgccccctgcccttgcctctggccggcctcggcctcgctacttagggccggctcctttccctttttctccactccccttctttccccttttctctactcccccgccaataacggcttcggaaaaggcctcccccgcagggaccgggtctcccggagccccgggattcagctcggccaccggaccctcgccacaagctgcgcctgtttccgggactcgctttcccctccgctctccctatttcttgctgtctttgtagctgtctctctgtggttctcctggctccttcgctttcttttcctctgtctgtcctctctttttcctggctctgtccatcttccgtccctaccccctctctctttctctccctccattctgcctttctgtgtttgtctttttctctcctttctctgccctttctgtccccctcccccgcactactaccccacctaggcggcactcagggcaggtcccttgggcccatgggggcgccggggtccccacggagctcattaacagcagccaggcccaggcgggggctcggtggagggatgggcccaaagataccccgtagggaggctgccccacccccagtggagctggggactgggggaaagaaaagggttgctcacctcagcgggttccaagcagttctggtggatcaggttcagaggcatcctctgatcccctttaaattgccggacccgcgctcttcactctgggcgtgctctctgtgggaatgcagccccgggggtgaggggacctgagtgccggtggaaagaggcccctaggaggtgtagcccctagctaacagctccaaaggcaggggcaagacttgtatcttgcaaattctctctgcaaggggctcttccccatctgggcaggggaagggggaggtcaccagcagagtaaaagtcctttggaggtagtgtggccaggcaaaatgcagcatccccagttaaattggaattttgggtacgtaacaaatacatttttagtgtaagtgtccccggcaatatttgcattttggaaaaataacgaataaatttgaaatttgtagtataagtgtcccgtgtaatatttgaattttagataaatgacaattttttagcatagctgtgtcacctgtagtatttgaatttcaggtaaacaacaaatacatttttagtataggtatgtcccatgcaatatttaggacatgcttatactaaaaaattacttattatttttctgaaatttatatttaactgggcaacctgtattttcatttgctaaatctagagctctgttacgggtatgtgatgagggcacaagataccttctcagttctcactttaggcggaccgaatgtacaccccttatgaggcttaccccaaggcaagaccttaagtgtggcatggctcgggaggtgccatgaggaggcgaccttgggaggggtcctgcaggtccccatcagcttccaggtggctgagcaattttctgaggcccaggttttcacccatattccccacccccaatgccagccaggcattggcagcgtggcccccatgaggctccttgtggttagggacaggctccctcctcccttcgtggtgtagtggaagaaaacaaggagtactccagtgctaaatctaggctcaacagatcaagatcaatctagctggttaccggtggtgtggcagtgtgcaagtggcttcatttcccttagcgttagtttccacatctctaaaatgggaatagtcatagccacctctctgagaggtaatgatgtacagtgacatttgtaaagccaaacacacaccataggtgtctactacatgtttatttctgcctcggacttccttccccgtccactctgccgctctctgtggactgccgcagatctctgaacttccccgagcctaatttgctccacttgttcacggagaaacaatcatcttacagggtagcgatgaggattaaactgcaaaatgcagtttccaacctttggcccagtgcccaaggcccaggggtccctcagtacttttgggtgtggcaaaatgaacatgaatctctgtttcagcagtttctaggtgccggtcccagacacggtagggggagacggcagaaagcactcctccttagagtgccttggaaaacaggaggagggcaggcccagagaccctgtcctgctgtgtccaaagtcaagtgacttcccttgctgagcctcagtttcaacatctgtaaaaacgggaaaaataatacctggtgctcctaggattgttttaagtacctaaagaaaatgtgcctggaaagccctttaacacatcacctggagttcaatcggccatcaacaagtcgtagctgttgttgctgctgctgctgctgctgctactattgttcttattgtaacataatggctcagaatgatttttggattctcccagagccgggattcagtgctgcagttcttagcagtgtgatcctgggtggatcgctgtctctgagcctcagtgtttccatctataaaatggggatgatgtccccctttcattgtggcgcagacatgcagcagggttaaggattgaaatgtttggcagtgggtggggcgagtgtggatttggcatggggggcgggtcaggaagttcacccaccggctctgtgtctcctccctagcgctaagctgcaacgaaaacgacgcagagcacctggaccgtgaccagccatacccgagcagccagaagaccaagcgcatgcgcacgtccttcaagcaccaccagcttcggaccatgaagtcttactttgccattaaccacaaccccgacgccaaggacttgaagcagctcgcgcaaaagacgggcctcaccaagcgggtcctccaggtcagccagggccaggggtgagggcatctgcgaccaccagggactggggtggaaccctgcacccctcgccgtgggccttggaaggaccttccaccctgtgtctgcttctctgtgtgtttaatctttctcattctctttcttcacctctccagcctgtccccatctgtatttcagtcttttttttcttactttgtcttttctctttttcagtttttgcctctctgtttttctgtttgcgtatcgctccatcctcattgtctccacactcggtctcttttctttcttctaaacaattcttagtttctgtttattattcaagtgacactcattttacacacattcacatcataaaaggttcaaacatttcagataaatctagaggccgccccaccccatcccaggacgtacacccaaggtgactatcattagctcctgcttcttgcttcttacccactctagtttctcttctcttgctgtctgcctctgtctcactcccccctctctcttccttcaggcatctctctagatttatcttctgcctcccagactctcctggaagcaaggtttggtggtggggatgtgtgtgggcagattccctgggtgggcaggtgggggcgggactgcccagaggacatggtggggtgggggagcggctgggtgcctgtgaaactcagcagaactgcacttacatgtgcgagtaacttcttaatagagaagatccagaactttcaccaaattttcacacccctagagatgttaagaaccctagtctggaggcacagaagcaggtcccaggctcctgcatgacccaaagttgtggcagagtcgtgggccacatctcaaacggtcagctcctccttttactcattttagggtcttaggcaagtcacttgactttttgtagcctgtttcctcatacaagaaatggatacaataaattatgctgccgggttatccaaggagccactgaaatgacgtgcctgtggtgcgacctgacacttcgttgctcagtggatggtagccaataacagcattaactagattcattagctggcatgattcactagtatgagcaattattctggtagtggacatcagtttccccattcgtacaaagagaaggcaagacaatgcctcccttgatagcaagtttaaccaatttattcttcagaacgtgtggttacagtgccagcgacacacattttgagggaagaaaaccgagggatgaagtaaccggacagcctcacaacaggaggggaggtggtgggattcgagtccaggccagtctgacccaccctccagccccaggtctctgggattgagggctgggaggtgacacagagggatgacggagacggagggctgcgcagctgccctgagaaagttcttgtgagtttgtcagaaacaaaaaacaaacaaaaaaatgccctctgtggggcgggtggaggctgtgacgcggcgcaactgcagctgcagctgcggggggagccgggagttggggcccctaggctcccgaggcgcccccttgagcagcgctgcccacggggagcgggcgaggggctgcgggagagggaggactgggtgacgtagccgagggagggagcgtcggccaatgggatgccgatgcgcccctctgggcccgcccctccctcatggtctgttttgctttggagtcccagtggcctgagctcctggtggatggagaacgtgactacactggctggggtagcaggtccctctcgtctgtttccttcgttgtttgccttcttggggttaggtcaaggaccctctttggcgtcccctcccttcagccgtgggtgagttcggactgaggacttggggttgggctgccttttctctgcttagtaggacccttcgtccttccccaacccagttgctctgtggcagggatgtccaatcttttggcttccctgggccacattggaagaagaagaattgttttgggttacacataaaatacactaacacgaacgatagttgttgagctaaaataataataataataataatgttttaagacagtttacgaatttgtgttaggccacattcaaagccctcctgggcatagacaggcttgctctatggagtggggtcaggggagggagggcagttctatgaattaatgctttagctggggatggaaccgggttcaggaagacctgggctgggttcactggctgtgtgtcttggacaaattagttaccctctctgagccatagatttctcatctgtagaaagggcaccattagggcacaaacctctctcagttatccagattaaatgaaatgaagagtaagtacccatagttgaatcagaatttccagtgaggagccagtctctgttggccttggggaggcagaaggcttggtcacctgacttaggaacaaatcagatttccaggagagttacctcttattctttcatctgatgaaacatatattggcaccaggccttggggacacagagatgaacaaaccatggtcctggccctgaggaaattcacctgttaggtatagacacagacccatgtacagtttcctcatggtgtgatccgttggggcacctactgagggagcccagaggaaggaccaaccatgctgtgtaccaggcagcatgatccctcttcccccaccatccagatgagaaggcagaggcccaaatgatctccacttgccccaaatcacactttatagttacctgcagagctggatccaaatccaggcctgcctgatcaatggacatagttctttcttctttgagccaatctggcaatgactgtctgggtgtgagtttcatttagggtctgtatactgggggtggggcatacgtgtagcactgttctccctttttcccagaccacatttgcacaaatcccaaatattcctattgcacatggtgatgcagcagtttacaaagcattatctttccagccacgtatctaccttaccttaagatttttctgcccattttacagatgagaagcttaagacctagtaagatgaggtgatttgctgctggatacaggagccaggcattggcagggtggggcttgcccccaggtgccctgaatgctgatggggaatctggcagacatgggatgggaacagtttgaggcagttggtagtatgcctttgaaaggtaacagactggttttaatcctgtctgacttaccagcagtgagatttggatgttttaatttctcctctctgagcctgatgccttatctatgaaatggggatgagaaggataccttactggtggttgcacggagtaaataagatgacatacagtataatttacagagtgtagagtcaggacccaggcatgctgatctcatgcactcatttacacagtacagttcagtctcctgcagtcatttacacagtacagttcattctgcaaccctctttgcacacattttaaaaatgtgattatcttcattttgcagatgatgaaactgagattctgagagtctagaaccctggccctgagtctcacagctagtaagtgatgaagccaggagtcgagttcagattggtctgaaatttccaaagctctttccaatattgcacacgaagggattttgacttttttcccttggatctggctgcagagtgcagcagtacagtgggagaggagggaaggtgtgggtcacagatgccatgtcttggtagggaagcagaaacctctagtaaagtgctcgtcacataaaaggtgctcacatttgccatcagcagcagcatggcaactacaatactcactatcagtgggcaaggtgactaggagacagaatggccccttagacggaggtcctttaagactttaagccttggccgggcactgtggctcacgcctgtaatcccagcactttgggaggcaggccgaggcgggcggattacaaggtcaggagatcgaaaccatcctggctaacacagagaaaccccatctctactaaaaatacaaaaattagccgggcgtggtggcatgtgcctgtagtcccagctgctggggaggctgaggcaggagaatggcgtgaacccgggaggcggagcttgcagtgagccaagattgcgccactgcactccagcctgggcgacagagtgagactctgtctcaaaaaaaaaaaaaaaaaaaaaaagactttaagccttacaaatgcatggagaccatttctcaccacatagaagtctctctgagttgctttccttccttcctgtggaagggccagggaagcagcatattaagatgccctaagcttggggaagtgagtgatgagctgattgatttgggtgggtgaaggtctccataggggttccctggtgtgactttggaagaaaacacattttaaccaccaacagcttaaaaaccatctttcagtctgggtgtggtggctcacacttataatcccagtactttgggaggctgaagtgggcagatcacttgaggccaggcatttgagaccagcctggccaacatggtgaaaacccgttccctactaaaaatacaaaaattagccaggcatggtggcgcacacctgtagtcccaggtactcgggaggctgaggcaggagaatcacttgaacccaggaggtggaggttgcagtgagctgagattgtgccactgcactccagcctgggcaacagagcaagactctgtctccaaaataaataaataaatagcatctttcaggtgactagttagttattactaacctgtgtgagaatttaggagttgagtactctagctttcctctggccactcacttgtttgacagatatattgacctgccatgtgccgggcagggctggaggcactgaggattcagtggggaacaagacaatgaacaagactggctgggcgtggtggctcacgcctgtaattccagcactttgggaggcggaggcgggtggatcacctgaggtcaggagttcaagaccagcctcaccaacatggtgaaacccgtctctactaaaaacacaaaaattagctgggcatggtggcatgtgcctgtaatcccagctacttgggaggctgaggcaggaggaggatcgcttgagcccaggaggtggaggttgcagtgagccaaggttgcaccactgtactccagccagggtgacagagcaagactctgtctcaaaaaaaaaaaaaaaagacattgaacaagaccccactggaacatccacccagagggcatgtggagcaaggtgtgggataaacaattgacaaggtgccaagattaatctctgtgtttttcttttaaatgattctaagctcaaataggtttgggaaaggctcaaggttgactgtgtctttctcttggagatcagagcatgttagcattaatacaggcactgagaaatctggaagagactcaactttgtctaatctaacatttcccaaattttatttggccatataattcttatttaactcttgtaaagaaataaaatggtagacgtgctaggtaggaaaaatgcaagggtacaattagagcacagagacctgacctgctgaaggaggtagtcagggaaggcttccctgaggaggaggtgtggtttatatcagggcaagtcacttcattactttgaacctccatttccctacctgtaaagtggtctttttcctgcctgtctaccacccaggtgggtgataagtgtccaatctagtcctagatggcctaagctgtatggagtttcacagacaatttggcctaaacctctcagttcaaaggaaaggaaatcaagactcagagaggtggagtgactttcccaagaaccacagcaaagtggttctaggcctggggctagaaccaagggtttctgatttccagttcagtgcttattacttttggttctttaaagaaaacttctttaaaagtttacaaaatactagaactgccataccaacagtttagaaaaataggaaaaacagaaaacaacaacagcaaaacaaacaaaaaaaaccgtacccttctaagagcacaggaatccaataattaaagtgtgtgatttagaggttaagtagtggttaagggcatagaaccagtctgttggaagtcacatctcaattctgtttgtgcagtaagaggcacacagtttctactcctgcaaattggcaataatattcacatctaccgcatagggttattataaggaccaaatgagttaatgtgtaaagtgcttaggactttgcttataaaatgcctggcactggctgggtgtggtgtctcctgcctgtaatcccagcactttgggaggccgaggtgggcagatcacaaggtcaggaggtggagaccatcctggctaatacagtgaaacccatctctactaaaaaatataaaaaattagccgggcatggtgccacatgcttgtattcccagctacttgggaggctgaggcaggagaattgcttgaacccgggaggcagaggttgcagtgagctgagatcgcactactgtactccagcctgggcaacagagcgagacttcatctcaaaaaaaaagatgcctggcacttcatgaggaatagtattcatcattattatttgctttatgaaggtacaataccagaaggcatagtttttttttatcctttttttcacctaacagccatcacaagacatttcccctgtggcatcgtggagtggctgtgtcatgactcccacttgccgcatctgagtggacactttggatgcagccattagtttgatgttattaaaaatgccatgatgggcatgaagctttcatcttttggctgatttccttagcatcccaggtggggatttgctgggggcaaagtgggtttcccactggccctcctggctttcttgatgaaagaattctggggaaggaggtttgtgaggcaaaacacaacttgcatggtcaggtagtgcctgggaaggggcaagaagcaacgtgtgcttcttcatctacccagggcttattggagatctaccgcgcaccaggctggggcaccccggcctggtgttagttgtgtcctgatgattctctgtctgaacttcgccttcttgtcccagacacacagtccagagaacttgaggcatgtgaaaagagaaggcctgtcagtttcagaagatgggtgggtggggcagactgcaccttgttgcttgcagctgcctaagaatcccagcctgtcagaaccctgagagccatagagatcgtatgatgtggtctaaccctcttgttgtacaagtgaagaaactgaggccggtccagaggtgagggacaaacccgaggtcacgtggtagtcccaggactggaagctgctctttccactgcactatagttgcttctctgtttcttcatccatttattcactcattcatggacttgctacctccctcaggaccatgtggcagggagagcatggactcttttagggcaagtggtcctggattccagtctcaggttgccctctgtgtgacctttggcaagtggttttaccactctgaccctctctggtttttaaatctatacagtgagggcaggcacggtggctcatgcctataatcccagaactttgggaggccaaggtgggcggatcacctgaggtcaggagttcaagaccagcctggccaacatggtgaaactccgtctgtactaaaaatacaaaaaaattagccaggcatggtggcgggtgcctgtaatcccagccactcaggagattgaggcaggagagaatcacttgaacctgggaggcagaggttgaaatgagctgagatcgtgccactgcactccagcctgggtgacagagcaagactctgtctcaaaaaataataataataataataatagtcaataaataaatctataaaatgggaataataatagtcgaatccacctacttggcttttcatgggaataacctgtggcagtgcatgctggagggtggcatggagcctggcacatagtaaaaggtacatacatgtcagccattcctatgaatacatattactgattcttaatctctgccagtctctgccatgcaccgggggacatgaagatagcatagaaagggtccctgctcccatcaaactctcaggagtggactttttgaaatacctgggagagaattctagtgaagccctgacaacatgaagaacaaaccccacacaaccccagagcagccgggcttttaatgaagttgttgaattttcatctaccagattcccagtgcctcagctctggaaagcagagaaggtagttgtggacgatggtgtcattgtttacaagcccactgttaggggcaacagcctgagaaatagcaaacagccggcaactaaccgggtccagccctgcccgaggtcttggagccccggatggatgagcaaatgagcacccggcaaagcaccctcaaaccctcgacccaggctccccgctccagctactgctctgagagtcagacgcacagagcacaggctgctcaggggtcacacgcacacaggccaggacagtggcaaggcagcggcaccaaggctccggccttctccaccccaatctgcatgactttggggaagtcacttcctctctctgagggcctctgggggcttccccatccattttctttaggccaccaggacacagtctctcccctacagatttctgctggccgggaaagggaaggacccccccaccccagggaaagcatgtcaagggtggtctgagaagcactgtacttatttgccagcccccagaaggggtgatgggctttctttgggcggagagccagggaaaatgtgccttcttcctgggaagatccagcactgaggagggagcttggtttctccacttcacagggtctggatctcccactttactccaagattcttgtggatttgcttttaattgagcccaaattgtgttacgccaccagaaacgggggtttgaggccacaggcccctgcagccggggtggtcccaaggggtgcgtggggccaggagtcagccctccctctcctgccagagacactgggaagacaggcagatgcaggacatctggaaatgcgcaactggacaccccagaatctgcagagtgccctgaggccctttgttttatggggaggcttctggcgggtgttttcctcacgcaaagggaagtgaaggggccctgcctttcaggactttttccttggaaggttcaacccccccagagtggcctggatttcctaagcccctcccaaagtacttcgtggacctctgggtacagcgggtccctgtgtttgtgctgttagatgggtggtggtacttaggtgctggctgtgtagatgaatttcatttttcttttcttttttttttttttttttttttgagatggagtcttgctctgtggcccaggctggagtgcagtggtgggatcttggctcactgtatcctccgcctcccgggttcaagcagttcttctgtctcagcctcccgagtagctgaggttacaggagcgcaccatcacacccagctaattttttatatttttagtagagatggggtttcaccatgttggacaggctggtctcgaactgctgacctcaagtgatccacctgcctcggcctcccaaagtgctgggattacgggcttgagccactgtgcccgtccttagatgaatttctgtgtgtcttcctgaatgcttacaggcgtgtgtgcaaagatatgggagtggacgcgtgtgtgtctgtgcccaaggaaaaatgaaagtaaacccatgttctctcactgacattcttttcagacagagctcagccccagctctgcgccccgccgcacgtccctcataagtcgatacgggatgcagcaggtcgggagagagactctgcgggtttcaacttccctggcctcactttaatttggctgccgttcccacgctgcctacctccacccacctccaccctgagacctgacacccagtggcccagggtacctggtggctcccccaaccgatgatggggataggttccgtgtctttcacttcctcttagtaactcattattattgcctgattctcatgtgttctttatcgcattcccagacttactgaccacaaaacatttaaaacattttaccaacaagaacttgtggggtttattgtctgctgaaaggcaactgccaaaaaaggaaaaagaaaaaaaaaaaaggaatgtctcaaagaaccattaggaaaaggatcaagatttgtctggtgtgtgtgtttggtgtgtctgatagaaatgcaacatgaggcacacatttaattttaagttttaaatgtcctagtagcctccttgaagaaatgaagagagacaagtaaaagtaaaattaattttaataatgtattttgcttaactcagtatagccaaactattaatcatttcgacatgtaatcaatataaaaattattgagatattctacctgctttttttttcatattcagccttcagataggttgtgtgttttcacctgcagactggttgaatttgggctaatgccattttaagtgctcagcagccatacgtggctcgtggctgtgatattcgggagtacagctcagctctggaaccacctatcagaaagagaagcccagccgtagcccattagatagagtgaaatttttgttttattttattaagagcaaaatattggccaggtgcagtggctcacatctgtaatcccaacgctttaggaggctgaggcaggagggatcacttgaagcctggagtttgagaccagcctggtcaacattgcaagaccccgtctctacaaaaaataacttaaaaagttagcggggccggtggtgctcacctatctatagccccagctacccaggaggctgaggcgggaggatcgcttgatcccaggagttagaagctgcagtgagtcgagattgtgtcactgcacttcagcctgggggaccaagccagaccctgtctgcaaacaaaaacaaaaacaaaaaaaccaaaaaagcaaaatattgccaacctgactttttggatcctcttggcaaaacacagatcagcgtccccagaggcagcagagctctgagtgaagcagtcggggggatgctctgcctgccttccgctcaccagcccttccctgtcgtcccccgcaggtctggttccagaacgcccgagccaagttcaggcgcaacctcttacggcaggaaaacacgggcgtggacaagtcgacagacgcggcgctgcagacagggacgccatcgggcccggcctcggagctctccaacgcctcgctcagcccctccagcacgcccaccaccctgacagacttgactagccccaccctgccaactgtgacgtccgtcttaacttctgtgcctggcaacctggagggccatgagcctcacagcccctcacaaacgactcttaccaaccttttctaatgactcgcaacccctcaccccacaatttctttaaaaaagaaattatctttagttgaattccaagtgtattttaaaatagaggctttgagcaactaactaaccacattttaggatctcgcctggaaacagaggtaaaaaaaagaagtgtgcgcccggctaatgcagcggtgtggaccgaggaacaacttggaagatctacctgcaacacaacatttgtgtcactgtacagttttgtggactgagcgaggaaaaacaacaaataatttaagttggctagagcttctgtattttcaaagactgccacgtgccttaggaatactgttttatctccatactttggatgacttgttcatttttctctccctctttttctctgtatatttatgaccagagcaaaaatgtaaaaaacaaaaaaaacaacaaaaaaagtttgttactttgaatagtcctaaaaagaaaaaaagaaaaaaaaaaaaggaaaaatcaaaccccctccaacggtcgctttgttgttttagaattttaaggtggaagtctgttcgaatatcagaatttgtaaaatctaaccagtaataaaaccacttattgaaactacttggggctgctgccatttggttgggtgtgaaattgacaggacctaagagttttactgaggcccagagatcaattctaggtcttcacatattcatcagatattcctggggctcctgtcttgtgccaggctttggacggattacagagatgccgagacaaagatccaattcctgctctcaaggaatcagaatggtgacacgggacagacaaaagatatcttaacagggtgtgatatgtgctcaagtggaggatatgcaacatcccattcattcattcattcattattcattcattcattctttcaaatatttaatgagcacaccctgccagatgcttgtgatgcagaggtcagaggcccttttctgctcctggctgggctggaaagaaggcatgtcaggcgatgagggaggcctcctgaaaaacctgcagcttttccctacgaggagtgaacgcagttaacaaagggcagcttaagctccagttttcctaatgacacaaaatttcaagatcgctagagagggcaaaagcaaatgaattctgttcctttcctaaagtttcagggaacctcagaaacccagagaaaagacacacccagagaggagggagggttggagccaggcagaatgaagttggaattcctactgttgagcagggtgagctgaaggaagtcatttcacttcattgggcgtcagtttcctcagctatgagctgaagataatgaatggcccttgcatggcagttgtagtgggggcaaaaggtaagatgtgttgaagagcccagcagaaggcctgacacagagtagggctcgatgcattgtagtgaatgacagacaggtgatgtgaggactctgtgggtggagagcaggaatgtgtgtatccaggcaccctctggcattgctgaatgcaccaagcaggtgtggtgtctgtcccccagacttctgacacccctcatttctcactctgagccctgcttcggagtactctgctaccagtttcattggatgtcagcagttaccaacccaaatgcccctgcaatggcccaccaacttgatcatccagatggaaaatcatggccacctggaggaggaaatagccaggcaagagtgggcagaggaaccatccagcccaggactggggtctctctctcctcctccctctgccatcattgttgggatagggtggagggagtgagtggggcaggaacgggctgagtgtgcttcaagcccagactcactcactttctgaaatgttttttgaaaaccccaagcacattgcgtgcgcgcgcgcgcacacacacacacacacacacaaacaaacaaaaaaacactattgttattgctataatgtctggcaaacagtagga

SEQ ID NO: 317 - DNA, 47755 bp, Homo sapiens
  source 1..47755: mol_type = genomic DNA
gtcccttgtttggagatgacaccaggggaaacagcagggaaggttctggaaggctggggagggcacacagtcccccttcccgcctaagctgaaccccactaggctggaaggacacgtatgtctgcatttctggaaggaaatgccgtgggggctgggggcaggagagcggctgggtcttggggcagacggggtgggcttcccgcgcctgcagcccggaggcgtcgagcgcctgatggagcgtcagaggagacctcgtcccagcgttgggccttctgttgtatttctgccagaaactcgcgttgaggagaatttgttttaagcgtttctctacctgtccatgcatctcgtaaatacagtaagcatggcaagccctttcgctggttaaccccggcgtccgtgtgctcactgccgccctgcacgcacgaggtcgcggatggttcaaagcacccgcggtggcagccggagaggcagagcgggctctagggacctaagacagggccgagctggacgactggtggcagggcggccggggaggccccgccgcggggaggtttgggccccctaccctgcggaactggaggcaagtgcggactccggctgcaggccgcggtctgcggggacgcgcgcggggggcctgcgtcccgccacctccgcgcacagcccctggtccccttccccagcccgggccggcgccgcccgccgcgtgactcgcgcgttccgggccgagtacgggctgtcccttggcccagcctcagccagacgcgggggagagagagcaggggctgggaagtgccggcaggaaaggaattggccaggggaaagaggaggaggaagatagatggagtcatcggttacggagcgcgctccgtccggcggagcgaagccggggaccgagagcgcgcaaggcgaagacacagcgacgcagccccgtccccggcctccggaccgcctgccccgctcggccccggctcggctccgccccgcccctgggtccgaacggaggagtgaggaggacacgagccgcgcgggcttggaacccacgaagacccgcaaacccagggcgccgccgtctccgaccacctgctgccgcggcaggccatcagcagaatttatacccagggcgcgagcccgccacggctgggcggaggcggaggcggaggcggggagggggggggggtgccggcttgcgaggccccgccccgctccctgccgccccgcccccctccgccccgccggcctcactcggggcgccgggacccccactccctccggggtcggctgcccgccgccgggttgggggatgtgccgaagggcgggcctccctgcggaaagcgacgtcacggccgctcctgcagtgtgaatgaatcaaaacgcccgggtgaccgcggcctcccgggcggccggcacgcgaagggtggagggggagggggaaggagcgggcgggggagggaagaggaaaaaagccagagctgcagcaacagcgtctcaacctgggatgtgcaccaaccccggagagcgagatcaaagggactggaaacagactggggactggcggggggagggggccggccagcctgtggagtcctccctgagaagcggagggcccggcttccaccgtgactccagcggcctgcttggggttttaattattattttgaaatttctgaatcgagctagagcgagagagcgagagatctccgtagactgcgactcgctggctttcgctccgagatgatgcagagtgcgactgtccccgcggaaggggctgtcaaggggctcccggagatgctaggtgtgccgatgcaacgtaagacacccccctttctcgctgatttaattctaacaagacagctagcagcctcagccgctgcggggcgggccggacgccgctcaggggccgggaggggctggcggccggggcgcagaggcggtcacagggcaggggcaccagccagagtgcgtttgagggggccaggctcttggctgtttggggccgaatgtgaacgcctcctggatcatgcttgaggcgagccgagtaccgaaccccgcatctccagcccaaggcttttcttggaacgctggggagagtgctgtttggggacacccaggggtacgagctgtaggccaggcctgagggcgagggtggtccccacaaatcttctttcgccggcgtgacggtcagcgcttgcaggaccgctagtgcaacttcaccccagctggcgggaagttggagagcgcgtctctcgcccctggggctggcggcggagaagccccggccacactcttagtccctgcggcccgcgccccgggcgtgcgtgccgggtgagtccccagccgctactgcccgcggcgcccgccgcgtgcgccgcgggaaactgactgctccttgtgagggaatctgctcgcgcattccagctagcctaggaatgcaggggagggagaagcgaccgcaagttgtgaattccgggttcagcctttgcgcacgcgagggcaggtgctcagggtggctcgggtttggaggggtagagacgggggtgtgtgggagctttgctagcctgcccgcccgctttcttcccgcgcccgaaattagcgagacagccggagctcgcggcgtgtttatccccaagtctctctctgtgtgtatgggtgtgcgcgcgcagagattttcccgaagggaatccgtctctgtgcttcactcctgagcgagagtccccgagagggaatctgtgcagaggccagaacaggtgcccagtcgtcgcgcgcgcgcgcgcgcgcgcgcgacaagcgccgggagagtcctgcccctgtggcttgcacgctcagcagggcgccccgggcaccctggagagaccaaggagttcctcgctccgcttgccaaggggttgtacttccgcctgcgacttctttagtggtgcggtagctacatcttcggggtttactttaagtaagggccggctcatccagggatggtgactacctacaaactagggcgcacgagcgcgccctcctgcgcctcgggtttccatggcagggtttctgtccggcgatccttcggagggcaggcgtaccgtaggcttccctgggaagtttttgagaagggactagaaaagaatagcttcatccaagcctatttagattgtttcttggctgtattctacagttattctttgagtgttttcgtgtcaactgccggcaatcagttccacgtctgtgttgagccttggggagtttaccgctaagatgttttcatagaaggcattggagattcactacgccccacaccccgcacacaggcagggacagagtgggttctcagcccctgcaaagacggaaacagaaaccctgcaaaggtgcaccgagtccttaagctgcttgtagctctgcgcgagtgaggagactgcatgagtgggggaagggtgtgtgtgtgttactagtgtccttggtacccagtacgtctgtgctttcatggctgtggtccgtaggtgacctgtctgttgggaccccaatgaaggacgatggtctctgctctgacggcctttcttgtgatgagtgacactctgattgtctcactttttgccttccctgttcagagacaactttgatgttcgacgtcagggagtcgctttgctaaaatgcccagaactcaccttcagagctacagtttgccaaggctgagtctaggttcacactgtggaaaacttgaggtgtacaaaggaacttccacacccacccccccagggtggcccagggaggcaatgtctaatctagagggggtggtcagtcctccctttgtccgagtttcgtgaccttggttggaggaggcatcggccaaaattgaggggcccactccctgaagacttctggatccagcttttatttcctcttggaatgtgaatggattgtagcctcccttgcagcacatctggcctctggctgttaggctgttggtgctgggaccgcgggataggtccccatcacccacatatacacaactattagttttcttgggactgggcccagtggcctaagaaggggggaagctcgaggggttgtggggcacacccttgggccttccgggacagtaggctcttaaaccctagaggaggggagacaaaagaaacgctctcccacaggggtccctccagtcgccaactagaagggtttccctctcaacacagacatgtttgcctcttcatcacatggagtcaccacgaatggagcacttggggacgcaggtctaggtgtccccaagctcggtgcctctagtgccctcccctctaggggcattttagaagaagtgatttaaatccagcttatttcggcggcagctggactattcctttgcttatttggggatgggtgaggggcataccctttaggaaaacgtttccaaatgatgtaataatttctctctcatctctggtcttgctccagacttggcctcttcctcgccactctgtcccggcctcccgcccccgcaggctcccgtgcggacttagcagttcgcgccgtagccctcctggttttttaccgcgccttggtcgcgcggcccccggtgcgggcctcgtcgctccgacagccctacagctgtccctacggcccgcaccgacagctcgtccccgccacctccctccgggctgtagggacgtcgagatccgaatcctcacagcgcctgacccggggccgtgttgggtacgggtacggcgagagccttccgagccgcctccaaaactctccccgcggacctcagcagtccctccacgcgtcggggccctgctggccggccatgccctctgaggagacgcggaaaagagcgaggcatataggaaggtggggcgttttatccgcctcggttttgacccatctgccatgtagtctccccaggcaccgagggaaaggacgacggaagcccgccgcccggatcgctggcgggagagagggcagcccgcacgggagaaggaggagccccgcggggtctccgctgggggtggtaattggaatgcaggcctgggggtctctgtccccctccttgtctcctaaaatgcttccggcaagctctggcgaaccccgaagctgtaggaaaaaggtattttattttgtgtttggtagggtcggggtaaaggttttccctgggacttcctctcctggggctcctccggggtgcgtggggtaatgtcccagcgcaggtcgagttgcagatccgagtccccggggttgttgactgtccttcttgcaggacatttcttaagggggtgagatggattcactgtccaagacaggagttcactcaaacgctggtgctgttcgctcttctttccattcctgccttgtctcctagtgcgagaaacagacacacacaacacacacaaattatatatatatatatatatatatatatatatatatatatatatatatatataatagattgagattctatcatattccgaacattccgatatagcagctgtaggcaccatagacctccctccctgcgtcgcgagaatatattctcaggcaggagacaatttttacagatgaggtcagctgtccccgccggccgattcgggcctgatgggttgggggttccgatgtcctaactgctaggatcccgttccagcccctggccagagctgtgtaccacaaagaagggagtttggagaaacccgggtaagcgcggcagcgccccgcttgggacagcggatggctgaggactcccaaggggcgagagggctccggcctcctcctttccagggccttgttatctgagagggccgttagcacggagggaagcttggaaagccgctgtcccagtgcgctccgcatgcggaattaactgttaaagccggacacggagcacgcaggtgcagcaggtgaggggcaaaggtctgcattgagcagtccgcagtgtcccgggaagtcgtaaagtcgggactgagaagaagcaggacctaactcaagtttatttcctctcttggccgaggtccgggctcgtggaaaaccagagctaggcggggctacgcagggctgagcaggagtggcgtcctagggtctgggagcgcgacccacatgacctcgctacgaccggggcagggctcctccgccccgcgggcagatgccggcctgggtggcccggggaacagacgatgaattctttaaatgagcgtttgctgcgcacccatgggcggctcacgatcctgggcactcgcccgggaatcccgggcgtgctctgggttttgggggactcgccggtggaggtagatgtggacagggcggccggcccttcgcgggtagccggctttgcgcttactgcgtcccgcagcggtgggtaaaggtcgtagcccagaaggggacaagggagggaccgcctctctctccccggtgcgctgcaatagaggttcctgcgccttggcccttgcagtccatccgcccagaggttcgcgcccgttttcggagcttattatctcaggtagcccagaggtccgactgagctggaattagccaggcctgggacccctttgctgccctttagagtggtggcagggacttttccagcaaggataggcgcggcaggcgcgagtgcggacggcgcgcccattaggaggaggccgggtgaaaacctctcttcctctccagacccatttcgttccaagcatttggaatgacaaaattaaaccccaaccctggcggctcgagtctaatgtgactgtttaaccctgggaaagcgatgctcccattttcgaaggggctcctcctcttcggagcggggaggccgccggcgggtgtgcccggcccgcgcgttctgcgggtgttcgagcctcggctccccactcggttccgcagcttagtggaccttgacgagcgctggaaacgtgtcaggctccagagagacagagtctctacctaggcggctgaggatgtcaattaaaatcgaccagggaagggagttggcggcactgtgcgccgccggggaaggcgaggtggcgcgggccaccgggtgcactcaccgcacgagaggccgcggctggactgggaccgagcgcatccctgtgtctcagggggtttgctttgtgcaggatgggaccttattatttttagacagtggggcaaacgtgtcttttaaagagatccgaagggtgaaactaatgaaaaaggaaatgaattactagaaaagccgtgaagggataaaaccgggagcagcaggaagttgaaggaaggacgaccgaagctaggtgtatctgcacctgcctcttgacacgccaaaaacaaaggggggttaaggcaagaatgtagactaaatgctgtgaggattagggtaacgcgagccctcaagacgtctcggagaccgcctacagggctgcaaataccagggtccatttttaaaaatcgagtgctcctagaggtggggtgggggtgggagagccgggaaaccagcaaagcaatttctttccattgagtagacaaaaacttgggccacaggggcatcttgtattttgaacagtgacccgatgaccccgctggccaggtgtagacagcctcaagtcctaaatatttgcattgtcctaacttcccagttgcctcggattttaatgccctttcactctgcgttacagtcaattagtgattacttagcatccacattagtagactgaagccagagaccccagtgctgggaggagaggaggagccgggggaaggaggatggggcttgcagtcctgcagggatggaaaattagttaacaggaattaactgttctttctattaccttgttatgaaatctgctttgagcttcttgttttggacgggaatggtgggtatttagtggatttctctggctgggaaacttgtgtcctcttcctattgaagagttgtggatggggggcgggtaggtggaatcggataaagggaccttgtgccttttctttcaattaaggaaatttttcaggaatagagctgaggagctttgggacgcatagggacttggaaccagtttagctgaagagaggacaaaaggagtaatattacccactttgagaaacccacggttggagacagactgaagcagcagtttgctgtggcagcaccaaatacatggctgcatagacggctgaatttggagagggctggctggggtgccgttgaggcgattttacttttgtaacaatgttttgcctttctcccttcctggaatgagtgttaacaatgcccataacagagatgtgggcaaatagggtccactgcttttagtaaaattccatcgcggtctggtggcttgaatttctctttcttcctccctccttctccttcccctgttcccccaatttcttctgtctatcccttccttcctttgcaaaatctttgcagggagaaacatgggatagtgcaggaattcacgacacaggggttttactcggcggggggggcggggaggagggcggtcgtgtgtccagcaggctgcaccgtggtggagccatctctctttctaggcgccctgggagggaagcacaggtgctgggtataggacagaagccgccctggagctgggctcttattgtctgtggtaggaagaaatcaactaaaattagatgccactgtgaggttttaccttatttagtcctcaattttataggatccctgatcaaaatggagcacaagtcaaccattttgaggcattgcttttgggggtaggtggacaggttgggtttaattggtgaaaatgaaatggattctcccttggaaaatggactttggggttaactgtatgagcggctgactggaaagtcgtcttgggaggtgagtcctacctcctgctgtaattttggtggatttcttttctcagatctccccaccctgttccctctgtcagtctgggtctagccacagatgtttaactgcagtacctcacccccacatgtctttaaagtataatttgctttaattatgatgttagggggttaagagattggttctgggaatagcttaatagagacaaaacttgcagccaaattaattgaaagtttcttgctatgagggaaagattgccaaacatatggaatactgttacagagtgagacattagaaaaatacattgtagagatttagcaatgattaaatgtgaaaatggagtggaaatagacgtgtctacaacatttccatacacaaacatggatttgcttaatgtaattttctgttttatttgcaattactgagatatatgatatcctactgaagaatactaattacgtgacaatatatcacctaggagataatccctgcaaatacatatttacattgtgtatttcatttgttactcgactccttatgttaaaatatccaaattacagccttaaaatgataacatcgaaattatctccagtttacttttgaatttgttcttttattgaagaggtttctatttttgactaagccgaaaaagaacaaaggagattttcaaaggcaccccaagccaccaaataaagcaaacagtaaaagtgggaaggattccggaaagcaagtgaagggaaaggacagcttcaggtgtgatcatttctgatgtaagaaggattttctgactttttttctggttgctagtcatttgtcaagacaaactagaaaaaactagaaattagataaaaagacgtgagtacactgatgcattttaaaacatgtcagtgcatatgatgatagagaatatgatttaccttcaatgcgatgctaatttttaaaattagaatttttctaatatttttgtggctggcccagctctctttctttaatgctgctgtcatcattgatgttcaatgtgccttttctctttatgttttaaagaattaatgttggaattttgtgctttagctgtgttatgtgattattactaggttgtgaaaatcccttaagaggaattttataaaaacattttggaaaattctgttattgtctcttcaagatacgctgatttagaataagtgaaaatataaaaacgagaactataaacggttcaacaaaaatgaatgttctttaatgacaaagagccagggttggggggcggcacacaccagatttgtcatggaaaactgagtcgtgggcctcaggttttccctgcgtggggactgcatggatgaatcaggccttcttcctttggtcacaattaccaggtgatttaaaaggggaattgtgaccagaaaacaggattttatcatcagcggtgatggtggctactttgaaatggaaagttttatttttgaaatatttatccagtaatagacctcttagttaatttaattttaatgtaactatacctccgttataaatctttgacctggacatttcagaactcaggtatgtgtttaggcaggtgtgccacagcttggtatatcctgtagcttcaccttgttgatgcattttagaattagttattccccgactaaatcaatgagccccccactgacagtatttcccaagcctgcctttagaaaaccatcttccttctttcttactcagggaacctgaggcaacagaacagcaatgtctgcaatttgttgttttctcttccttacatgtgggaaaggaatggaaaatttcaagaaaaacatttgcatactatttcagttgcatatgtgattccttaaagccccatttggcgtctcctttcagttagtagtcagtaaagaaacttaacaaataaataaaattaaacgtttttggaaatacatattggccaaatgttatttgagacagagctcaaaaaactgcttacttctggagggaaatcaccagcaaaaaggttttgggcaaaaatcccagatggaggtggctttgattgagcacaggtggaagccatcagacccagagtaaaagaaggtttagtcctaattcggcctcaaactgtgtacccgtagggaagccccttattctcagaaccttttaaacgtagacaatgaatgtccgcttcacagggtgtctgggaggagggaatgagcttgccaatttgaaagtacttgaccaagtttggagtgctggtggtcttaaggcactcagagactgggatcacagctcccatttcacagacacagccgcccctgggagcactgctggctgtcccaagaggatggccacctgagggggaatactgtggggtctgcaaacagggagacccggaagtggctcccatggacccagctccttttctcgaaaggagcaagaaaaaccttgtcctgagcattaggctgtcaagtcaaagcatgaaacaaaaagaacacttcatccagaaggcagttaaaaagcaaagggagttaaaaagcaaaagcctcacaggaggcacatcaagctggcacatcaaagtacaaactttacaaaatattaatctggtctcagagcatcgttaaataaacattattcccttttaaaattattataatagaggtaggggctcactatgttgcccagactggtctcgaacttctgggttcaagtaatcctctcaccttggcctcccaaagtgctgggattacaggtgtgagccaccgtgcccggcctaaacattcctatcagtacaaagttttaaaaatatttaagtagcacatcagcattatgattccaatggaaagatctgaaattctgactcctttccccagaaaggtgccttttcttaaatatattttagaagtcattgtcggatatgttggctctcatattagtctctttagtggaatttttttttcctttacccttttgatcttccgtgacgaaagggatagaaaacaccatttttcaaataattaaaatcgatcaaacaaacacaaacgctctgtgaaatgtttcatggtggcccctggttccttgagagcagtttcttggaaatgaagaaacgtgagtggggaatacaaatgcatgatatttattatctctcaccagaggggtgtgggcagtttggtctgccatggatcacatcagaccttttgatctcttccacttcccagctttcggaaaccattaatggaggaatttggggatttaaaaatggaatccagtttctgatgggccactgtgaaaaataagcccaatgtgcctctgtcacaatgcttcaggtgctttgagggctggctatcacgttgtgagttttaaaagcttcctcgatgaagaaggagattatggctaccggggaagggtctgtagccatttcttatcaagtaagaaatagtctcttttcctttgggcatttagttgtctctaggaaaaaatgctagaagccccaaacgtcaatttcaacccaatctaccctcacctggatacattacagcaacagtgaagtaagatcaggcagttgtggcctcaacctcctcatttttaccatccacatgttcggagagaccaagatttggcaactttgtcattctgcagaggaaagagtctgccagatccctttattccagaaagactgagcccttgtaatactgcattgtctgctgtttatactccaggatcacgttgattaaaaaagagtgtgtgtcttcggaatgctttagaattaagggagtggaggagagttctgagtgtttaggagggggttgagggagggaaaaggtatattgggaaataatgaagcatgaagtaattttgatacactttatagacatgcatcttgttggcaactggctatgagacagtgaaggagagagctgaccactggccttggacagtggcactgtgagggctcggtgttttacatgcattacctgatgtggccataacacagctacctcgaaagagtggtatgattatccccattttatagatatgaaaatcaaggcttgaagacattaagcagtttgcccaagatcacatacagggtggaattaggatctgagctcaggtctgactagatctgggatttattggcatttggaagacctaaagatttgcagatctaaactctgatcagaacagaaaactttcaaattctcccaatatttttaaatttttgttttgattttttttgtttttgtgttttttttctttttgttttgtttttgtttttgagacagagtcttactctgttgcccagactggaatgcagtagtgcaatcatggctcactgcagccttggactcctgggctcaagcgatcctcttgcctcagcctgccaagtagctgggactacaggtgcacccgactatgcctggcgattttttttttttctgtagagacagggtctcactatgttgcccaggctgatctcccagtatttttgagccctttccaaaaaagtatttgaaacaatgtttctacttccttctgcttttctagttcactcactccctactctccccactgcttcaggattggacagctccctcattcggctaagccttcctttccacagacagagcttgatttcagaattggctttttttttccagagtggcaatgcctcatcccatgtatgaggatgtgagtgcatgtgtttgtgtgtgtgtgtgtacatgtgagtatgtgtctttgagtatatgtgaatatgcatgtacatttgtctgtacatgtgactggtacatgcatgtgcctttgtatatgtaggaatgtatgtgtctcaaggtgtatctttatttgtgattgtgtttctctgtatgtgtatgtacgtgtctgtgttatatgcatgtctatgtatataagtatggtgtgggcgtgtatatatatctgtgtgtatatatatatatctgcgtgtatattgagtgtgtatgtgagtgcgtgtgaggatgtctgtatgtgttcatgcaggtacatgtgggcttaggtctatgcctcgactatgtccctctgcatgactaggaatgctctggtgggcgggccttgcagatgggtagtgtgttgttctatgtggtttagcatttccaaagattctttggctgttccagggacattacttttttgtttctgagtttaccctctgcagagccccagcagagagcatcgtcacgaaatgcttatgggcagataagagaaaaactttcattttaagtgaaacgactcctcatattgagttgatattaatagatcaaattttgtctttagtgactccaagcatctatgtaaattgcagttttaatgtggaattttgagatactaaatactgcatgaaatacattgagcttattggggatttggaaattgtcttgccccttggaaattttggttacaactttctttcttttctttcatttttttgctctgtcatccaggctggagtgcaggggcgctatctgggctcactgcaatttccacctcctgggttcaagtgattctcatgcctcagcctcctgggtagctgggattataggcatgcaccaccatgcctggctaatttttgtttttttagtagagacgggatttcaccatgttggccaggctggtctcaaactcccggcctcaaatgatctgcctgtctcgtcctcctaaagtgccaggattacagatgtgagccactgtacctctgtaaggggaggggaggggaggagttctcccctcctctgccctgcaagaggaggccaaggtagtcttcctcgacgcctcctccctcaggaggaggagatccggttcatgcaccagaactttattcctggtaggaaacctagataaactctgtcctgtttagcctttctaaactgtaaaaataataatttattacaggtttaattaagaggcttatgttgttgctctttgaaaaatttccagatagtttatattttttactaatctaaataattaaataggggccatgttgcctggagtgtggggtctgagttcacaggtctccacatcctcacaagtagggatgggcgccatcaacaggcagacaccttgtagctgggggaggagattgtggacagaggctgctgcttcccgccctcctgtggacattaggcatccatcccatatgacacatgcacactagatgcctgtgtcatctcagtttttgcctctaacatttccatttacccagctgttagggagctcaagaggccagtggtcttataatcccttgttgctgtacatggaatcgtgttgagactctctctgccacaatttcctatctaaaaaaatgacaggctcaagccaaataaggggatggttcaggccccttgagctctcaggttgggttagtccatcttcaggaaagcagcagcacagtctattggttggaattctggctcccccaccgtcagccttgggcacatcgcctgatctcgcgaaggctcagtttcctcatctgtaaaatggggatgataattccttcctcgttgagagtggctcactgacgtaatacacactcaagccctgacgtggctcataacaggcttctgatgcctgcgtgtattactgtgattggtatattggagatcttttagagcatttccaaattatctttgtttaatccccccgtcaacatctacagtggaatagaaaaggtttttaatttttaacttaaagggcacccttggtaggccccttccatttttgccaagccagagggccccggtttggtcccaaggcctctctgtgaggacttctaatttgggcagcccagagtgacccagcgcggatcctttcctccaagctcgaggctgaaacgacttgtctgtctgcttttagtgttgttcctcaatgtgatgctgtctctgcttacaagcctctaaaactcccctgcccaccattccctgcatacattagccctaatgtattctctcttgaatactcatcagattaaggctcccactagatatcctgctcaaaataaattttatgggcatatatcctcaccctcatcccatgtatttgtggctgggaggagaaatatagccaaatctcttctcagagggctggccaaacaacaattaggtaggaatctgtggccccttttgcccaggagccaagggaggtgcaaggagttgggctagctcccagcctgcatgccaagggccagagaagatggtgcttcatctgggttctcaaagagttaattgcccccctgggagtccagctcctggaaatccagatcacacaaagaagtccctgacctgactcccagggcagaggtgcggctgtgccactggggcatgaagccctccctgcacagctgtgcctagcagcctcctgccacggctgtgccccgctgtcggggctcagtgggcacacagcactgccctgtggcacacagcaggccttgttcacacattcctgctggctctgcatgccctttgtacttaactcacttccctgagctggcagggcttcctggttgggtctcccctcctctcccctgcaagaggaggcctgggcagtcctccctgacccctcctccctcagcctttcttctgctcagcagaccgcaagggcactgaactcagctcatgctggagaaacccgctcccccttgcccttcataaccctcctgacctgagttgtcccctactttctcctgcttcagactggggggcgtcacaccaaaggagttcctggctatccacccttcatagactggtgggctcatgtgtcacctcctcaccaagaccttccagggccctccagggattccagccagcccctgatggcccctgatggcccctggagggagaccaggggtgtggctgagtgagtacctgcatggggcagacaggcatggccccaagccgctggcataattgctgtgtgaggcggccactcggcctccacgggagagtcatgacatctctgcagggattcttatgagggctccataagaaaatgcccacgaacatgggtgcctaacttgcctttccgtgggcatgacagttatctcctaataatagcaagcctgtcttgagcacctactgtataccagggcctgtcctaaaaattgtccatgtgtcaatccgtttgctcctcacaacaatcctacaggcactattgtcatcatcacccccttttacaggtgaggaaactgaggcagagagaggctaagtcatttttccaatttaaaaagcagagccaggatccaaacccaggcagctgagctccagaatccacattcccaccccgtgtcctgcccatgccctcactgggtggaaacccctgtggccgtcattgttcagtactttgctgggcacagtggaactcctgggtaagtactgattgactggactgcgtattcctcaaggaggaaaactgtggagatagaaaaaaaaaaaagaatcctgtatgtactgggacaattagcaagtgggacacctgatagttttcatgggatattttggtctgagaaaggggtcaacaggcaaagcatgtataccaggcctgacttccacgcaaatactggtagtgctggggccatgaagggaataggctggggttggggtttaattgggcccaaagttggtacttctgtgtacagggctagtgatggcatttagtgagtgtcccaatagcctatttatagggtttaagtacaaacgtcttaatagtcaagaaagccttctctctacataggtttagatgtgtttaaaatttttcttagtacattgagggtaattcctttatgttaacactttttaaattatatcacaaccaacaaatatgatatgaatcaaaaacatgtatgaggccaggcgtggtggctcacgcctgtaatcccagcattttgggaggccgaggcaggcggatcacctgaggtcaggagtttgagaccagcctggccaacatagtgaaacccatctctactaaaaatacaaaaagtagccgggtgtggtggtatgcgcctgtaatcccagctactcaggaggctgaggcaagagaatcacttgaacccaggaggtgaaggttacactgagctgagattgtgccactgcactccaggctggatgacagagcaagactctgtctcaaaacaaaacaaaacaaacaaaaaaaacccatgtatgattcatgagagatttggttttactgctgttgacattttggagtgtacaggagatactagtgaaaagctgtttcaaggtgagcctctcagacaggatttaatcaatttattatttagcgataaacatctatggcattacccttgtgtgccaggcaccgtgctaggcagtgaccgtttagacaaacaacgagcaaaggtgtcttttataataggggtggtaaaccctggggttgccagcctcgtgagtgctgtatcaggaggatactgtaggaggccaaacgcttgcacttttgtttttcttcttaatacttgttgatttgttaccttccttttttgaaaagcacaggggaaaatggctagagatcctagtactgtttgttcatccaaccacggaaacctgaccattttgtagatgttgaaacagtcagtgactcaaaatactatcaaattcgcaagcaatcccttggaaagatgggatggtggagaaacagacctcagataggaagtcacccaggacaggaaccggatggggcagtggttagggttctgttgcagacaatagagtcttctttcactatttaagtgaaaagtgattactcatcaggtggcaggtgactttcaactcagtggagccagctggttggagcttccaggataactctcagcccccagaatttcactgcttctgctgtgactgatcaggacagtgcaatacccaccaaagcacttcatcgcctccgccgtgacgcacaccagcacaatgggagcctgcccctcagctatcctgacatttagctcagttctgaattcaagtctttcccaagagcatttgattggaagactcaatcatcttcaaaatgtgagccgctagggcatctggaaaagcagtttctagctttcctatctgcagcaccggaaggcacattaggatgaggtattgatccagccaatctatggtatcagttgcagttcattaaaatattgagattttctctacaagagcacactcaggcttggaccttgatcactgcccgccccctcccccacaccatatttatcatttgcttttcaggacagatggcctttcagtccaggcctgggcagggctcactttgggggctgatgtttttagcagagcttccaatcacttgtgaaaatgtcgtggaaacagaggtggatgttgctgagccttcctggcctgttggctgtggaactgcagctgacataaatgggttagctgctgctgctagccttgtggtgcccttagaaacgagtgattcctctgggccaaagtcaccccaagccagaatccacagcctggccagcaaagcaagggttggctttcagtccccacttgttccttgactacgtacgtttgtgtgcaatgtataacctgtacaactatatgcaacagctctgcggtttgggccatgtctgtttccaccatcagcagagtgggaaggcacccgccagggcctggcctggttagcagggctgtgtggaaggctcacagtgcctctctctcctcttcctcacagagattccccagtgcgctggctgcaaccagcacatcctggacaagttcatcctgaaggtcctggacagacactggcacagctcctgcctcaagtgtgcagactgccagatgcagctggcggacaggtgcttctccagggctgggagcgtctactgcaaggaggacttcttcaagtaagtcagaacggtccgtctcgtggccctggcctgtctctgcctctccccaagcagtgagggggaagtttgcagcagggtaggccagggagggtggagagtccactctgggaggggcaggtaaatcctggagctgagaggatgccccttgttgaggtcccccttctgatcactggcccatcactgccagaggttcagcctctagacctcatttgatctctgcatggggcaggggtgaggagccagaggccttgggctagatttctccagggtggttgacaaagttctgcaaatctcctctgttgctccaaagagcaacagaaagagttgctctttctgtcctgatatattggtgcttcagggcatgtggttgtaacattcccacaactttcagagcagctgcttttaggttcatgtccacatccagaggcgtctctgtgactgtgtttgcacagcctgcttcaagggccttagaggcttgcaagagttgcttctggcaggaggcaagccaggctcggtcaatgtcgtcactttatatggaaacatgactaagaaagaggcagtttcatgtgatggttgagtccaggctctgcctgtattcgaacccacttattggcggtgtgctcttgggtaggttacttaacttctctatgcctcagtttgtttatctgtaaaatggggctcacagtagtagtccctacctcatgaggtttttattagctttaaataagtctatttatgcatcaagtcctcaggacagtgcctgacacttgagtgttagctcttaagactgtctgagattttcctttctggggtggggttcatcaaaaacttcctgttggagctttggatcagggtgagaagacctcctggaaggtgttttccatggcatttagtccttgacttctctcccagaatctattacccaaggcagtgatgttggtgccttagccaatgtggagcagctggcagcaagcaaagccaagagccggaggtgggggttagggatcagtgacgctgagccctgtgttcagtcacaccagcctgggtggcccagggggcgccagggaggctcgccaaaggctgaacacacccagcccagataaccaagccccatagaggcacctcatgctgaagctgtgtattcggaagatgggggttgagggggagtaatggggagaaatgtgagtcctggatacagaatacgatttctcccacatcttcccaaaggtttcactatggagaataagtgatttgaatatctgaggattctcacatttctttagtgcagtgagttgaagagcacattaaagatcttggtaaccagtgcgtggggctgcctccccgcctgtgtgcagagggtgcactcactgtcaccacggtactttgctcagatatgtgctgctccctacgtgtgtgtgcgtgtgtgagtgtgtgtatgagtgtgtgtgtgacagtgtgtgtgagagtgtgtgtgggtgagtgttgtgtgagtgtgagagtgtgagtgttgtgtgtgagtgtgagtgagcgtgtgaatgtgtgttgactacaggaaggcaggggcagcaggtgacatgggtgcccggcaagtccttgatgtttgggtggaaggacagacctctggtccttcctctgagctttttgtgtactgctcttctttctcacaatcttcctgttgctttcccacctctgaccctcctctagtttccttttctctggcattcatgcaattccattccctctagccacatcctttcccagtgggcaacaggagtttgcctctattttccttcctctatgatgtcctggccaagcaccacagcagctgttacaggaccctgggtggagtgaatttccctgtgtttgtgtgtgtgtgtgtgtgtgtgtgtgcgcgcgtgggttgacatatgtacccgggtgcaaatgtgaacataatgtgtgtgtgaagagggcaggaagcggcaggtggcagggcctagccttggggtcgggtgagctgccctgcttctgtgatgaggtgtgtgcagatgtgtatgcctgcacctttggaaagccaagaggccacgcctccgcttgcccgtctcggggcagggtaggtgctggatgtccgagtcagacctcagaccccactggtttctggctggtccagtgtggcggctcagggaagcctgtggggtatgagcaaagcctggcagggccactgacccaggacttcatcgccagagggctgccttggaccccccagtgcttcctcagggccctgtctgatttttggaccctgagtggctggctatggtttggaaagagagggtggagaggaaggtgatggcagcgcaggcgtggggttgggtttgggagaagtaatgaccaggaaagagggtctccctagacccaggaagcgcccacagtgtgtgctgaggagggatccccacaggcctatgagccaaaggcccaagaccagaaataacaagaacggctcctcacctgggccttgcccctggctccactgccccaagccctggccctcttttggatcctttcagggccttactcagcagaaaccttctggctagtccctccactcacctccctgtagtctgcaacccttcccacccggtgagtcttccgccaggtgggccttcccgccaggtgagccttccaccccacagcccaggccagggcctgccccttccctgaatatgccacagagcctgccagaggcactggcgcatcagagcctcctgccggcgctcccttccagtcctagcccgctgctttcctcaggtacctgacgcccaccaagcaggatgctccattcccaggcatgcttggtgggctgccgcctccacacgccagcccaggctgtttcatcctccagggacggtgcccaccctccagggcttccatccttccagggtcctcagagtccagctccgcggcagacaggatccccagtggagccatcacttcctgtctctcccctctcccgggtgacccagcacagaatgctttggtttgcccatttctcgtgtgcctggtttatcttccttgttggcttgaggaaaaggcctatctgttactcatttttctgtcccctgtgtaagcccctggctctgcgctttgtccataggccactgctgggtttgatgctgcaacaagtaaattatccagtgagtttacacgagctttggtgaccagtttcttctgtatgctgcaaggcgtctttgagtgagggaggcccaggctgcttgcaaatgctcaggcccatcatttagccacggtcacttcccttgttcccggcactgctctgcttcatgaaatgacctactctcagggctgggtccttctgtaatgcagggcatctggccacggattcagtgctgagtttgggccattgactctgtgatggggtgctgtgaggaggggagttcaaagctgaagtgattctccctcctgtcaatggagggccaacccgagatgaagaccaggtggctctgaagtcctcagtgggtggattcatagccctcaccaagctcttggggaccagggctgtttggtacaggaaggcacagctgcaggctccatcctaggtacagacagggaggcagcaggctgtccagcatctgagtggtcccacctcccatccccaggggtcttgggacttgctggccacctggggctctggggcagcctgctcctcatcccatctcattagatgtcaccaggcacctctttcagagggcacatgggggcacacacacagtggaggtgcagtaaggacagagaccgtgctggggcaggagggggcaagcagtccgtggaaccccaggtccctccctggctcaccctcggctatagaagtcacatctgtggccaccttgtgagagggacagcaggtgccacatacttgaatttgcccatcagacctctgatgctcttagctgtggagtttggaagacagctggtcagagctagggagagtcccttttccacgctccttgaagaaaaagaaaaaagaaaaagcatgtccttttctggtacctcctcctagccctgttcagaggtgggggcagggctcattggttccctgattagcactgtggtcctaagttcctggatcaatactttaatctctttgcccataacaaggaagagggccactgctttgcacaactccagggggcatcctcctgtcatattctatgtgaagttctgcagatcaatacggagatacggagagtacccactggaggtgggtagtaccttgtaatatctcaaaagtggaaggaggccgggaggtcaggacttccccagccttccacaggggcatgtggcgatcctggtaactggcagcagggggcgatgttggtgtggacacagaggaggcaagaaggattgttgggaaattgtactctgtggttgttgcatttttctttgggggctgttgagctctgtcttgctcagtaacactgactgatttttgctgttgtttgttgtttttgctgcttgtgtccttggctctccttttttccaaacgaaataaaattctgagacccaagaagaaaggcactgagttgactaagggagcacagtggggaccatgatttgttctgagttcagtggcggcttcaaacatcaggagagcccacccctggtgcagagggtgtcccgagccctgttataatttgaatcccaagctgcggggcaatgactcctcgtgtcgcatttgctaagcaggtcctatccagaccatgtgtccagcatgtcatggatccttctcatgtctcctcaaaaagggaccagggcccagagagagtagggatccaggagtggggtttctgggtccccttgctatcaccaggtgggtcctggaaggagccaggcagctgccttcctctggagcacagcacagacctcttggagctgggttcaagtgttgcctgtcggcagccagctgggtgcccctaggcaagtttctttgcatctctgagcatctatgtcctcttcacagtgcctgtctaagagccctggcacccaggagcatttctcaaaaggagtgattttctcagcagtgattttccttttggtgaacccaaaaggagctcagttgaattcctgtcctatctttcgttagcagtttgtcagcacaggtaactaggtctttctgagcctcattcccttgtctgtggagaggagctcacgctaacccaccgagctaggaagaagacgtgtgtgacccgggtccagcagaatgctaggtgctttgtaaacactgccgggtttcaggccctgccgtgtggccccttgacccgcagccctgcagggtcaggtagtcagagttccctcagggcggggcctgcgctggctttcctggtctcccctgtaccagccttgagagcttcccatggagatgactcttaactgcctggagctcctcagttagtggggggttagcctggcagaacggggtgggctgtggtccatgggagaaacctgccatgtggatctctgtgaagagttgagaaacaaaccattatggagtgaaaacaaacagagctgtggaattgaagcgagggcaacgttcctacacgtttgtaaggtcaagggcaaagccttcaaggacaatccaggcttgtgggggcttcaagctgtgcccccagccactggggctccatatttccatctgcccgtcagggggcgtggagtgactctcgggtgttctgagggtgctgccactccaggaggttcctgtctaaaacgtcatgcttctcaggggtctccctgcccctgaggccctcacaaggcaaggcaggcaggcagagatgggtgcgccagaggctcccggtagcgggatggaggccgctgtgtcgcaggggagctgtgcggctgctgggccaggccaggatctccctctgctccccgcggtgcccctcccccagcctgccagtctgcaggccgtaggtgggctgtccgccaagggcaggtaggcagcgtccttgggagcccgggagctgctcccatttatctccgcagtccagaacagcgcatttctgcctggcgtggctgcagggtggtggtgctggctgcagacagggcttcactggtgaccttagcccactctggtgaccagggcctctgctcctcatcttgcagggggcagctgcccacaggacattggctaatatggggaaaaacaggctcgacccctctgcggggtgggcttcatggagagcaggtgcggggttttgagtccaggctcagcgtgaacttggggcgttagacatcaccaagcctcgctttcccatctctacaggcggaagaaaaatactgacttttctgagtgactgtgaggactgagtcagaagcagcaaggaagtgcttagtccattcttaggaaggccatgaggggcatctacactgtgccccacatagggaggaggaaagaagacagcaggagggcctgggaccaggctggcaaggacggggtcctggggttgctggccaggctgtgtcagtggtagtggtggtcaggggattgaacaaaggcccacccttcagtgaggagccggcctgcattttcctcatgggatgctctccctccctgtgtggtccagagctgtgggcaggaaccgcagccctcagcgctcgctcgcatcaaagagcggggccagcctggtgggaggcggcagcccgcgcctgggtggctttccactgtctcaagctttcttgtgccctgttgccccagaaagaggcagcctcagttctggggttggtcgtagagtcagtgtggagtcagacttttgctgagccacttattatttctgataaccacacacctgccaggccatgcaggcatgatcgtgcgtacacacacacatgcacacatgcacacacatgtatacacgcacacacacatgcatacacacacgcacacacgcgtgcacacacatgcacacacacagtgctctagcagaatgtgcttaaggaatgcacaggggtgtgtctctttgatgtgtgactttccataatttctgaatagtttatagtctaatttcctcgctaagcaaattaaaccttttaaggtaacgatcagatggtccggatagtggctgtgcgtgtggacatttgaaagattcaaacacactggtgggaccaggcccacagtcatttgtgccggcctgtaatcaaggcagaagcaattacttagccccgaagctcccccagggaccgaggctgtaaatcaggaggtgatgagtcggaggaggattgtctgcccgccccagagcgtgcagttcagctgcagtcgcctgggccaccctccccgagtggggcctggggtgaaggcctcctgacatctgtggaagacacatctcagggactttctggcttagaggaatctgtttggaatcacctagctgcaaattagtctggggatcagatgcatctgggctgtggaaacggggtccccagtgggatctgggtgacatgggagtggaagctgtgggcagccctcttttggcccaggcacagcacagcagccagcggcacctgccttccctccgttgctgaagatcggtttcctctcctcacccctaccctggccattcaggtgccatgccatggggttcaccactccaaaaggccctctctggacattcctgcagcctctgtgccttcaggcccttgtctttgggcctctgcaccactgtaacttctctaattgtggtcctttcccctccttccctcctcagcccgtctggctcttccctccgcccatctggtcacgttgtccccattgcatcctggctgggcattcaagggcccatgatctggctcagccttactccctgctggtcctctggccaaggtcacaccagggtcccattagagccagtgtctagtttgtcactctggtccccggaggccttcgtgtctctggaagccccactctgagaagccacgagcttctccacagggctggtctctggtgggcactgtggatgagacagcaggtcagcctgggggcctctctcccacacacccattccagttcctgcgggtgtctgccatgcgccgtctggagaatgaggccctcagtcttgagggactttgggactctgacaattgatgagtgacctgcagatgcccaggtgggctaagagcataggtgacaggatttctgtaggagtggtctgtgccaccgctgcactgggccatccgtggggctggaaagtgtgggttctgggccccaaagtgggagtcaggggtggcttttctctcagtaagcacccccgatgcgtctcccgctcgggggagtttgctcacagctgagctagcagcttggcagaggctgattggcctgtagtgagaagggcagatgaggtgctgcgggaagtaagggagaggagggagggtgaccttgggccaggcagctgactgctccaagcctgtggctgtcagaaagaagggaatactaatccctccctacaagggcaggtgtgtggtttgaatgagatgcctcgcatgaagttgcctggtgcatatgacatgatccgtgcttgtttacaaaaacacctggtggtctggactcttctagaagggattcaggtcctgcacgtcccgttgcctcttcaaggaaatctgcccccagcagggaaggagaggacttgaggccaaatggacgggagagttgggctctcgtccacttcctgccatggatggagctgtgtgatcttgggcaagtcactgcttgtctctgggcccccatttcctcctctgtgaaattagggccttggactaggtcactggttttaaagcttttccagcagcattcatctcaacatgataatatcgaatattctttaaaaataaaaacattagattaaaatcctgataaaaagcagattgctgaggggctgttcccatgggctgggaggtatatgtgtgaatgtgtgcatgtgacatgggggctgtgtccccagcccccgaggctctaagattctctggtgtcaggccttctccaaataggacccccgtctgtgtctggagaaggctgcccattctggggcagaactttatgtgcccatgacatggctgtggccttagagtgggcggtgatatatgttggaaatattggtacatacagtaacagtaaatatcagcaactttcctgtcaagtgtggtgatagataaaagaaatacatgtagggaagtgtcagctgggaaaaaaatatacggccagcagtaaatcaccgccaagcaattaaagcataaaatcaacttgtgcagtattttgtttcctcaggacggtgcaccgttccatggcagctccacgcacaggaggctgacatgggtcctgggctggtccccaccgactgccttcaatagccaagagtaaggaagacatcccagaggagaggcactgagttcaaatcccagctccaccgtttgtctgtgaggtctggggcagttactaaccctctctgaacttcagtgtcctcatgtccaaatgaagaacaggccttcaagcattgcgcaggactgggtcactcactgatttattcatcatacatgcactgagcacatatcgtcagccaggtcctgctctgggtgctggattcagtagtgaacaagacggataaagaccctgctgttgcagaacttgccttctagagagggggaaacagggtcagcaagaaataagtgcacagcgcatctactgagatgagtgctgtggagcagggaaggaagtgctgagggggaggggtccaggggtgtccccctgagcaggtgacatttcaggggaccactgcaggaaatgcaggtacctggggggagagcgtgccagcagggaagcagtgcccgggccccaggaggaggcggagtggactgggcagtggaggagggagggtggaaaggcgatggcgctgggatgccatagtgccttggtggccgttagggagcctgtggctttgaccctgagtgaggtagaagccactggaaggtttcagcaggggagggcgagggtgtgacttaggcccactgtggcgaccatgtgcagaagtgcctgtaggggcatgggcggaagcggggagactgttaggaggcagctgtaggtgctggctgatggcagcccaagctagggaaggcggtgtgggtgtgagaagtggtccccaacatgatataattttgagtagaagctgggcgtggtagttcacttctattgtctcacctacgcaggaggctgaggcgggaggatctcttgagcccaggaattcaagcttgcagtgagctgtgattgcaccactgcactccagtctgggcaacagagcgagaccctgtctccaaataataatagtaataataatgatagtaataataattattattattctgagtagagtcaacaggatttgctgacagatcagatggggacggatgcccaaaggttttggcctgagctgtgggaagaatgaagttacagtggtctgagatgggaagggctatgggaggagcagagggtgcggggggtgttggtaggagtttggttttggactccaaatccatgtgctgtagaggcagtggagccccagtctggagcccaggggtctgggctggaggtgagatccccaggggagcggggtgggcagagaagaggtgtgggaggaggaggagcaggagcagaggagcagaggccggagagcacagtgtaggaggcagcgagcaggtgtgttgggaggcttgggaggccagggagaggggagctgaccgctgggctgcagcacagctctggttgggtagggcactgccttgaagggtgcaggaagtgggcagtatagaagggaggcaggcagggatcatagaatgcctgtacatggatggaaggagccagcagaggtgaagctaatgacacagaaggcaaaggggatggttgctgggagtctcattacgtgagaaggaatgagctgtgtctggtggaggtgcatggttcacctgtgggtggcaggcaggggctggggccccgggtgtgcgagtggaaggcacagtgggaggtggggagggtccaagccgggcttccctcttccatgggaaatgggagggcgccagcagctgagcctggggctcagtgggggagcgggtgggaggtgcattctgacccccggcccccgaggcaccatcagtccggtgggcaggggctgctttcctggctctgtggatgcccgtgctggggtggggcaggcgcagggcggagagagggcagggtccagggtgtgtggggagggacaggtgggatcgccctggggtctgctgggtaaggaaggagggaagcgagggacagtgacaagcccaaggggaagggcagtccctgggttgtgtgagtcagtgccctggggagctggaagaacagcggggtccaatggtgggagggttggaagtgacccctggagctgtggcagttgctggtaacaacaaggtctgggggagtgagcggtgggagggagggtagaggccacagccttcaggaggtcaaagaattgagagggagggcctggaaggatggtctatgtggggactgcagtcaccaagggtgtggtgggagtgagggtgagcctgagttaagtcacccaggcgggaagcaagtggagcagggtggcagtgcagccacggggtgagtgccggggcattgggctgagggctggaggtgagggtcggatgagatcacatgtgcagggcccactctgcacaggacacaggttggtgctaggagaatggcagctgcctttattaccagcgtctcagtgacccacttgtggtacatcatgcgggtctgctcagaggtcggaacttaccatcaggaatgtgccagacagccagggtgtaggatttatgcacccctggttctagaaggctcggtccctgcagggcctgcctgctgccccctttctacagggtccagaccctcaagcctgtcttgcactggtgagcagcccagccaggtggtcgggagcagcaggggtggacaaatcaacagcagcaggagctcaggcggagctcaggtgcagaggctgggacccagcacacaagacctagtcctctcctggggtccagagtggcccatgagagtcagccgagaagtctcagctcttctctgcccacacctgggccagccggaggatgtggaaggtggacagcgggccaattacatgtgttggggttaacacactggggggtgagggcttccctggccaccccagcactgcagggctgggagcctcatgcagggggctcagagccacatgagggggacaggccctctcctcgagctccagcctaggtcagggcaccaaggccgggtttgctgcccttgaagcccgccgcatgtccgctgtgttgtgtcagaagcaccgactgcaaaccccggttctctcgctcgttgcccttgggagctaggggtcggcacctcacctctctgagccccagttcttatctgttaaaaggtgtcacagtacccacctttcaggctaggagctcaggagacagtctggaggcagtgtgatggcgacagcaagtgggatgtaaagtcttgtggtttagtaaaccatgggcctcatttcaacccgggacttaatgcccttcttagaaaagcttttggctgggcacagtggctcacacctgtaattccagtgctttgggggccaagatgggaggaggcggcgagcaggtgtgtcgggaggctcgggaggccggggagaggggagctgaccgctgggctgcagcacagctctggatgagtggggcgctgccctgaagggtgcggggagtgggcggtagagaagggaggcaggcagggatcatagcatgcctgtacatggatggaaggagccagcagaggggaagctaatgacagcagaggcaaaggggatggctcacacctgtaattccagtgctttgggggccaaggtgggaggatcacttgagaccaggaattcaaggccagcctcggcaacatagtaggacccaatcactacaaaacatgtcttaaaaaatgagctgggcatggtggcatgtgcctgtgatcctagctgctcaggaggccgaggtgggaagactgagagttcgagtgcagtgagctatgattgtggcactgcactccagcctgggcaaccgagtgagatcccctcacccctaaagaaaagagcttaaaactgcttctctgctctgagaagcacaactaactgccttcactgaaatatacctcaggcagagatttggggtgagatagtaggtcagttgatgttctgcaggaaggggcagcttgtccatatcagctcgctcacgccgccagtccattcttaaggaactgccaaccaggactgatgatgcattttagctttgagcttttgggggttatcctaccaacaaacagtccttcgggaagaaaacaatcccaggaattaacagatcagaatgttcacactggttaatctttttctagcaatgaacatgaagctagcagaagctggtgtgtttccagatggttcctctaaccaaactaatttttcactgttgacaagtgaggcaagggttgcactggaccaaaggctgaggcttggccatctagcattccatgcaaaatggtttcctataagcattccttttattctctattctatcctgggtctgcctcaaccatgagataggagagtctccggtactagctgctgtagcactgcccttcatccaggacagttaaaggagtcttggacctttctttctctgggatcgctgcccagcaccttcctacagagatgactttgaaaggaaaaaaaaaaaaaaaaaaaggaaaaacagcacaccattccaaggagcctggcattcctgaatcctccttccctacaaggtgcctgtcacctgtctttactgcctccttttccctgtcatgctcatcagctatggcttctgtccaagtgcctgaacagaagactagaacctccactgcaggctggtttgaggtcgtgatttatgtcagaatcttgcacagcactgctaatgtaaatttcagctttttccctctaggataaacacttaccaaagtatgcaactttttttggtgggaagagggattgtcctgtgatttctacccattttctgaggcctgtggaaataaatctttaggtacttaaagttagaccaaaaatagaacaaagttaataccaaacttgaaaaaaaaaaaaaaagaaaagaaaagagctgccattatggagagccaagcctcccctgactactcaggcaaatgttttaagaagcagttcgttcgttcactcattcgtttgctcattcgttcattcattcattcattcattgggtctttgtggcttgcctactatgtgctgggcagggataagacaatttccagtggtgttggttagaggatgaaaataatatgagccattagcaagtcttccttgcattttctctgtggttttggatcagctccagctgctctcctggggggactggttgtccccagaggcctggctagcaggactgggcagcaggcttatctttctgaagggtgaggccagtgcccttggtgcccctgcatgggtgcccggtgatcggtgttaaggggtgctgcttggaaaagcccttgggagccctcttccttggctggagtccagcctttccctctttaccccagcgtccttcatatttggtccagttggttagacttctggttctctgtgtagcagccgggttcacagttttacctcgtgtggggccagggaattctaggcatgaccgtgtgtctcattattgcctgtcgcagggcaagtcatgtgacctgccaggctttggccttctcacctgtgactctggctattctaagatctgggaatggggacagtgtctccatcacagacacacccctgtaggatgccctgtattctagatacactggctctgactggagatggggtggagggtgatctgcagggctgggctgggccgggggagccttgtgggccaaggaggtgctgcatgcggctccctcggcaagggtcccgctggctgtgctccaggggaaaaggtaatgaggagccacttccacttcccttcagtataaatcccacaatcaggaaaattgcttcaattgctaaaaaacgctggtggggaagtccacttatttttcatttttcttgtgcacttgccaccctcatgcatgaatcactgtcggtatgtagattaaatttatacccccgttatctttcatgtctctggtgtgctggtgtcagctgggcctccggtgactgaaagccccctgcctgctttttagtgggagagagtgtggcccctgtggaggaggctgctgaagggtcttccctctgttccggggtctcctctcagccctcctctccttggatctctggttaggacacattctccagatttgcgtggtttgttgggagggttcgcaacaagcatgatgaaagccttgtttcattttaattaattaatttagagacagggtctcgctctgttgcccaggctggagtgcagtggcgtgatcttggctcactgtagcctcaacctccctgggctcaggtgatcctcccatctcagcctcccaggtagctgggactacaggtgcacaccactacacccggctaattttttgcattttttgtagaggcagggattcaccatattgcccaggctgggctcaagtgatcctcctgcctcagcctcccaaagtgctgggattacaggcgtgagccaccacacctggtgccttgtttcatttcagtacctgctttgcaaattggctgggattggatattaaatatacaggccttttgaaaacactctctagtaacacatgtgtaggcttcctttctctgttatacacacacacataacacacacacacacacacacacacacacacacacagtagaggtgggtgcctgccagccttcctctttgatccaggtgatgtggttacacagcagttgtggaggacctggttctcacctgtgttctgggaggtctagaaccatccagagccgactgtgtgctttgttctacatcctcaggttcggccatctccgtgcacatcctctacaagtatggtgctttatctgctgatttatttattcaacaaatattaactctactttcctgggtcctgaatccctttaagaatctgatgaaaacccaggtcccctcctgaggcacaattttgaacaacttagcaggtggtttacaggcctatgctgaccctcacgcagagaactcctgctctaaatgggccccatctctctgaaaaccaagaggcattccaggaattcagaagcctggggtcctcccaagccaccacctctcagcccctcacaccccaacacccttcttatacccatctcagaagagtgttccctgaagtacactctgggtctttcaggattacccatgcagacttagagaacccccacttttctctgggatgctgtgtccctggtggggggcgtctgaggctgctgctggccatgcctattccgggcccccataaccccctcagcaggtatcattactgcataacagacctatcattctgcattaatctggtattcatcatgatagccatgaccataattaatttatttggtattaatgtggatgaaatatgtactgtcctttcaggggaaatcaggctgcctataagcattagttaaaaggaccattaaaatcaaaccttccccagatccattaggcgaagtctttcatcctgaagaagataaagttctgctgtgtgaaatgtcatgaataattaggttgattgctgttttaaactctgcccttgctttcccaatgcctcccgcctccctcctgaagcggggaaggctcacctgcagccacgcaccctccttcactgtccctgtcggcccccaaatttccctcgtctcctatgaccatcggtgtgcctctgttgatctctatgaccagaatggggaaagggagtggaaacaaccccactggacgatacttttaagtgtcaatttctccttccttcccggccttggcagggggtggcttgcttggtagaagctgccttggtggcagcaggtagcttccttttgcctcggtgttgttctggaaaggtgctgaccaaggagaggtctgaagcagcattttccaaactgtaatctgcagactccttgtcccgaatgctgtaggggctgaaaagtgcagcttcctgggcccttcccaaaccaccatgccccaggctgtgtgcgtgcataggaaggggatggaggtaggcttggagggctttgtgtgtgcagaatggaggtgaggggagaaatggaggcaaaggagagagaacagctgtcaggacagccttgctctgctgacaaagtgcattttctctgcagcgtgctgtcccctggccaggcagggcctcctccctgggagtgtgtgaaaaggtgttgctgggtgctttctacacacagcctgtggcacacacagttccctgtgaggatgtcctctgggatcaaccataagggtgaggaagctgggaggtggagggggagacagcctgctttgagggacttagaaagtccacctgctccccctgtgaattgatgggtgttaatcgggcagctggaatccgggggcatcagctttggaaaaggtacctgagggagactctagttctcatcagtcccttctttggtggttgaagagtcccaggcacaaagcaatgaagctagatggaggcagagaggaccagacggtaagctctgggtgactggggggtgaggctcatggagtcccggagtggtggggtaggagggaggctgctccaggaagttgggggaagccagatcccttgctccctgtgtgccctaatcctttcctgctgccctgacaggcgcttcggcacaaaatgcacggcctgccagcagggtatccccccaacccaggtggtccgcaaggcccaggactttgtctaccacctgcactgctttgcttgcatcatctgcaaccggcagctggccacgggggacgaattctacctcatggaggacgggcggctggtgtgcaaggaagactacgagacagccaagcagaacggtaagcagcatggccccgcatggtcccctctccaggcctttgtttgggccacgccctctgcctgaggtgcccttctcatggcgtcccacctgcccatccctcagagccctactcatgcaccgccacctctgagaagcgtcccagatctccacactgagagtaaatgctgaacacctccccggccgttagcactcgccggcttcatggaagtgttcatccagccatggttcctgagagcctgcctgtctccatggtaggctcagaagcagccaagaacctggttgttaccatggtggtggcctccttccctgggtggaggctggggtgctgaggggtggctgggagcttggtctgtattggacacgtggggctgccgcttagttttgcacatcagggtgcacatggacctctcagcagcccctgcctcaaaggccgtcggtgagagcccagcactggcctctgcacacttcatacatctgtctgttaattgtgttctgttcgcctcgcagactgtgggctcctctagggcagggcctcctggagtttctgcaagtgcccagtgagtgctaaaagaagaggcaggacacatgccagattcagggaggctccgtctcagcaatatagctccctccacccacttcaatatagctgcccccacccccttcaccacaaccactgcagggccactgcccacggtggcagcaggagctctgcatggtggaggccgaagtcaggtcccgcatttagcagccacgcctggaaaggcctagcttggcctggcggcagcggctctcgccctacatgccatgcgcttgggcagcccggggactttccagcgtagagcccagaacaacacattccccatgctcccctcgcaaagccaaggtggacacttttattcctgcagccctacctctggcttctcactcccagatgcacccacatggtcgtggggtcaggccctggctctgaatttgggatttggccaaacccaacatgataacctcagaggtgtgaacgcacaaaacatcaagttccttggcctttgactagaattttgatcaactcagggtgttactgtgcaaaaacggctcttgttgacagctctgggcttgatgagaaaaaaaattaacaacaattttatgtatctccttctagatcttttctgggcccacacacatattatacagatctcatcaataatggagaaactggttttttgttcattgaacacagtataaaataaggggattgtggtggtgaggaagcagaggggattcataagggccctttaggtgagccagctggagctgggtttggctttggtccatggcaggagtgggcagggcttcctgtctctttgaggaccttccctcccaccacccccacagctctggcctttcagggtggacagaggcctttgacctccttcctccagagacctggggcctctgcaaacccatcccaaggctctttgcctgcaatgtactaatctgctctggtttcttaaaactcactccatgctattgccttgaagtcaattgtgatgtcatgggagattagggcaacttgtcagggatgaaccatcacagcagatggactcagagataccaagacacctttggaagtctagtgccgttcatcagagatactaagatggcacgacctccccggcctgcagctggttctcatcagaggcctcatttggactctgagcactctcagctcagcatctcctgatgttgtgggtggttcaagagacaagagaaacagatgtagattggtcagaatctggctggggaggtgggaatgacattgtggtgctcacagttttatcgaggaatatttgcaccacagcagacctctgcaggatgatggaagatgccggacttgctgtcagaagctggctgggcatccccccacacagggagatctcctggcaagttgtagaactggctgaccctcggcttctcagctgtctatggaggatcatagcatctgccacgtagggctgttttcctgaggtttaaataggatgaggcttgtgaaatgggatgtgaaataagagactgacgtggaggagaagtgcaaacagggaggtgaggtgtgcttgaggttttaaagcagcggaatgttacacagtatttctggcctgttccccgggtcctttcctgaccccaccctggctgtgagcaaggcagggctcctctgtcctgggcaatcggtgatccttggagcagcggggagttctgtccactgcagaatgcctggctgtcttttcaggttgttttaattcctccttgctactctcagccctcctgcaggcttacagttccctcccattagctaaacaaaggatctcagagcagttacttgcaccttagtgtgaatgattttgttcacttgttccgtctccctggatatttgcattttcaatataatgaggttgcgttttatgccagggacaagttctaggagaccctgcatcattcaaaactaacatattttaagactaattttcctgtaggaattaatgtagagtgtgtgggggggggggtggtatattctgagagcacataaatccataaccagtgaagtgtatctttgccttaatgctactttttattttctcagcattatcttgaataccttgcagaacgctctctcctaaattaacagcccagggtatcatgggctcccttggccttcctcatagcgttttgtcacatttaacttccgtaccaaagttattgatttttgggtacatttttcagcacgagcactgccactgctacttaatgaatacttggatgacattgttatgggatataaaaaagattttaaattataataacagtgaatgttaaaataacagcatattagtccccatcattgcaagaagaaaatcctgtgtgtgtagcagtgccgaaccagcgggccaccaaccaggatgacgggtctatcccagtggcgctaccatctggctgtggtgaaaagaatttataattccgtaggccaagctattttgaaattaagtgattctcgagaaattaaaacatttttggtgattgcattatttcacattttttaatataaagattgtacacaagtgcactatttcccatttgcataattcaaagttgcatcagacactcccgtgtagactataaatatgcacagaagggacagactcctcagaatgaaaaggaaggcattttggaggttcccctttgtcttttggaatgactctctaagtagtgtagtctctgtggcaggggctccggaatccctacccttcgggttcagggcttcagggagggagttgggccacagtagttccgggatgacagtggccacgtgagagaagaaaacagcccgaggagaagggaaggcacgggtgtgtcccccctcactgtgtacacacatgtcctggctgcacagctgcttcattcctctagtgcctcccaagatcagggcaggccgtgttgccctctggacttccaagggggaagtgagttactggcccaagtcactcactcatcaagaacactgaagccaggtctgctgactccagggagagccttgtagattgtgaggaccgaatgcatataaagtccttagtcaacaccagcacatggtaggtgctaacacatgttggctactattgtttctaagagagggttttcttgaatggaaagaaaggagaaaagacagagaggaagtcaggaatgtcacagagacaccttctggggcacacaggtgagcaagcacagagagcagagctgcccaggccagctgctgactttattccgtgtgtcctccaggggcactgtggagaaaagggcagtatgcctaagtgctgggagaggaaacaaacctttacattcacctgtgcttccgaacacacgcacgcgcctctctctgtacctgactttgaatggaacaaaccagactttaactaacaggaacttgagcttgttcactcaaaatctgtctaggactttgtgttgatcagtcagtgtgttgcccagaacattccttagactagttttctcaaaaaattttgactacaatccacagtaaaactcattttacatttcatctcagtacacatatttatacaataaaaactaaagtttaatgaaatgatcttgccattccatcccattctcttcatctgatttcctgttttagttttgatccactaaggtgactttacagcccacgagtgggttctgacctatagtttagaaacctgcttagacactgttgggtgtgcaagctcacccctggctgtgagcccagcgacgccagggcaaaggtgacatggctgtggggaaatgggagactcctgatgagacagaggggagggcatctggggcgactttgaacatgacttcaacctggctgttcaccttcacagctctggcaagaactcatgaggatgtgtgagcagagtgtttgtcatgacagggacgtgtggaattgggtacattcaatctgatgagacttctgtgcagctgggctggcaggggagggttgaggcagggagctgagcagagaaaggactgctgtcctcacttttcagtggcttgggaaggcccgtggtgcaggagtcagtgccatgagagtggggacctctccactctgatgtcccctgtgcctcgcgctgtcctgcctacagcaggcaggcttaggtgcagaaaggatggaagggagggtgtgggaggaggcgcagctgctgcagataggccgaagccagtaagcagtggtttttccttgcagatgactcagaggctggagctaagcggccccggaccaccatcacagccaagcagctggagacattaaagaatgcatacaagaactcccccaagcctgcccggcacgtgagggagcagctgtcctcagagacaggcctggacatgagggtcgtacaggtgagatgccagcactcctgtgccctccggggatcccaggcccgggacaggggtggaaggtatcctgagtgacatcagctcacgggtggttgggctcagggcttgaccccagggcttttgccagaactgaagacagagttctgaggcccacctggggagagggggtggggcgcatcgcactcccagacctgtgctccattcaggcttcagtctgcttccagccgcccgcctagggggtcctgggggctttgggtttgtggtggacgccccctgagtatgtcccttgtgcttgtgtggcaggtttggtttcagaacagaagggccaaagagaaacgcctgaagaaggatgcagggcggcaccgctgggggcagttctataagagcgtcaagaggagccggggcagcagcaagcaggagaaggagagctctgcagaggactgtggggttagtgacagtgagctgagcttccgaggtgagcagggctggaggggccaggccgaggccttaggaaagtcccctgggaatctgtaatccctggcactcaggagggatctttcttgaggccttggcaactccctcctgaacacaggcttttccttaagacttgcagtgaagggtgggggaaatggtagtggccctttaccatgggacaggagtaggaaacaagattgctgaggtctggaagctgggatgggccaggccccgtcctgtggccccaaggtctcccctcccctcctgctgactggggcctccctcatcagcccacacagctatgaacagatgactgggttccagccttgtgcccctagcccctctcccatctttgtcccctttgctgggacactggcctactcccatagtcccctagagccaccccttcctccagtcctggtggtggggaggtcatgctccacaggttttttcctgggaaatcagtactgtgagtgcatgtgagatggggaactggcttcacttccgaaatccctttccccaccactcacttcattctgtcccctgcacacaagctttgcagcatgcactatattcaaattcatgcatcagcaaaattgtaaattactgcatgttatgaatcctcaggttgtttgcaaagaatcataactgttctcaggtactgagttctcaaatgtggaaggtcttctgcggagggggaaagggaagagtactcaactggcgatcagagacctggtttccagtgcagctctgtcaaatcgattcacttctcttgagccccagtattcccaagaggaataccatatctttgcccatctcactgcgttgtggggatcaatgaacacaaccaactgtggatgtgcttggggaaagcctggcacatttgtatacctggaaggcatgatcgttcccacagggagcgtgtggctcccgcagagggccctggtcatttgggatgacaggtatagggaaaaggctaactcatggccatttgacaatggagtggagccttcatcttcctgctccctttaaagagcatgagctccccccaccatgttttttcataaggggaatggggggcaggcctcagaagggatggggtgttgaagtctagtctggggaggccttatttagggattggtgcagaggcccaggtggaaatagaaaaggaagtttgtgggacagaggatggaacaagttgcctgccaggacaacgatgccctgggaggactctagttcagcccagaggtcagctgagccctagagggcagcctcctctgagaacacagggcccgtgaggccttggggacagctcatgggactaatactcaccttttaggcttcttggcaggattgggaaagtcaatctcatctgggctgttgaagtcaacacctagaacatactggattgttaagctcatttctgttgggtgcaggtgggtccctgggctgacctatcattggtttctctgggaataatttctcaaagactaaaactgctcacctctgttggagagagaaattctttcaagtggcaaagattccattagatccccttaatgaaattctttaagaaaaaagaaggttcatttgccttaatcaagtcaattctttgtccccagtgaagagcttattgaatacagacagaaaccaagtcctttgatattgaacctctcttccagatagaccagaaggattttgtacagatgtctaagagtggtcctcagcttccctgaccatatgggcctgcttgcttcccaatcaactaaaccaagccctttctcagcttgaaagctttcagggtaaatgttgtcagcatgtagtttccatttgtgatgtggagacatctgacccacccagccttaggcattcatcctcctcagtgtagccagagtattagtacacgagccacaagggaccaacgagctcaccaaacatttgtccatccttctgggacctgggaatttagtctttgcaggtgtttcttgtttttctccttggcctgggttggcctctggatatcaggctgccatattggtgtgtctgacccatgcttggctgcaaggcagctgccatccttgggcatctttcctggtcatgtgtgttcctaggttgtgaagagcaggggaccatcagagtcctggcagctgacaataaatctccgttcttttgtccacagaggatcaaattctctcagaacttggccacaccaataggatttatggcaacgtgggggacgttacaggcggacagttaatgaatgggagcttctccatggacgggacaggacaatcctatcaggacttgagggatgggagcccctatggaatcccccagtctccatcctccatatcgtccctgccatcccacgctcctttgctcaatgggctggattacacggtggacagtaatttgggcatcattgcgcatgcagggcagggagtaagccagacgctgagagccatggctgggggacccacctctgacatctccacaggaagcagtgtaggctatcccgactttccaactagcccaggctcttggctcgatgaaatggatcatcctcctttttaaacttctctcctccccaccctacctgcccccctggcttgagagaatatcttcaaggatcaaaagagacttgccttttaaggatcgaaagtacgccaatgtgaatttccattattttcaatggaagtcctccgctgattcctagaaggctgtgagaccacactagggcattgtttccctggggaagcagtgggagagcagactcatctcagaacacagcacagggggtaatggcctagagctctagggacactggcttgttgggtctctcccctgctgttctgcttaggggcttggctgctcagtgctttggtagcacaaggtgactgtgataggcccccttggcctttgggaactttgctccaactggtgtgtctcacacaatgcctcccaaaacactgctctcaccagaactgagactcctaaggtagaggcctcacagcccttgagtaaaataaaagtgatttctggaccatccttattgaaccctatatttcaaaatgaaaagatcagttattaaaggtcagtgaacactttgatggccagtttgatattaaaaacatgccccctccttttttatttttgctgtgaagatatgaattctttcctacaaaccagagaatatgaacctgttttggtttttaagtgtcccatctatatcattgactctgatggcaagaggtggttttcattgcaggtgactgaggctgagctgagtagccctggaccaccgctgcagattgcctgagtcgtccccttggtgcacagtgtgccttcttcaattgcttgtatcatttattccacaagacaggctgtgggctgtaaaatgagcaaaactaaaatgtggggagaacaaaatgacaatcaatcagtgaacatttgtagacacatttggattccaaacctgcagtctgttcagccatatcggctgatgccagtcttccagagttccccatcccttgtagggtgaaatatttggagtctgttttgaaggagttggtttagatgagcttgcaagtctacccctctgaaagctttctctgctgtcctagctgactcaattggaggacagttttggtcatttccaggaaccagcaatttttttttggcctaccttggttgggaagagtaatttagggagcagccctaaaattgtccaaagggttctaagtggttcttgggctgcatctctctggattgctggctggacacctgccatgccttgggctgcagtcccatggtcagaaagccagaactctctggccagtggtggtgcagggactccccgttgtgcaggtttgcagtagcaaatcactaagcctgaggccagagcaaggccaacccccgctttacgagttgccactcctgcgacagactgcactgctgtgggaaacgctgtcctgaatggtgctgcagctcccacccaccttgtgcacccatctaccatcaggaagctctccatgtgcaaactggaatttagccagctggaatttattcctgtccctctgggaagctgtgtttgcttcttctggcctcccattctcttaaatgagatcagcagagtaggaaagggtgagaaggcattgcctatcacatgaagtgatggggccagagaccctaaggacccttccttctacgaatggttggtcaccttttgaggactgcaaagacttaggcatgtcataggcagactaaaggaagaatacacagttcctcttggactgctacatcttttgtaagcccttttccaggactaaactaagttcaattaagtaagttctttaaaacagtaaattccgggatcagccttcgggccctcttctctgaccaattttatagcgtaccctcgttttttggtgtgctgcagtggtcatgatttttgcttgagaagtctgcaaacatagacacttctcttgaggttccatgtttatggatgatgttgtgttaatcctagccaattctgtgctattgggaatt

SEQ ID NO: 318 - DNA, 12183 bp, Homo sapiens
  source 1..12183: mol_type = genomic DNA
gggaatgtaggaagcactctctccaacccctgcttttgcaagtagggaaactgagtcaaagaaggagagtgacttgttttaggtagtggcctcaggcctcctaaatctcactggacactctttccctcatgcctttacctaaagacaagcatgcactgcataagatttgcagagcacaacagcctcactttggggaggaggcgcacttcagtcctaacatagccttgcagataaccagcatcagcttaccagcctgctctttttttgggccaccagaaattacatgggggaatagttaggagtgaagttctaattcttttgatgtgctggcaacaaacaaatcacacattcattcattcatcaaacattctgaagacctactatatgctgggcaggcctgtgttagagcagggtattacataaagcatggggagatacggtgcctggcacgtagtagctgtcgaaagaggacagtcactttcatgaacctgggagtcactagaagagctccccctttgggtgagcagaggtttttgcacccatcaagggtttaatgtcagagaccagaaccagggaaaggaatggtttcattctctctgagtcgttatcaaggtagggacaaaaaaagaaaaccacacagcgctgagggaaaaaagatttttttttattaatctttctctttaaaaaaagttgattttttttgtttttgttttttgttttttttaggtaaacctctttctgcttcccctccgtcactctgccctacctcctcttaaaaatataaaaatgtccaaccccggataactagagtacaataaataaacagtaaacacaaaaacatactttatttgtttcttctttatacaaaataaggaaactagaagcgttcaacttccaaaaaagtataatattgtacatcctgacggcccagcctccaggccctgggcagggagggtggtctgtgggtctgagcccagcaatcctggcgccccacccagggggagagcaggatgtgtgcgtgttcgagtccggcctgctccctcgggctcaacataaacgtcaaagtaaggaagagcgggagctggacccggctggccacttcctgacccacagccctattcctagagaagctgaccttgagcctcaagattggccaccagggagcgccagcgtgcaggtggctcggtctccctctcggtggctcccggttcacgcgagttcctcgctcgctctccgtcttctccctctggctgacgctgtctctccatctcctcctcatcttgccccctttcctctccctctctttcaatctctctccttttcttatcatctttttttttaaagacggggaaagcacagcgagaaataagattacaaaatgccactcggattgcagagagagggaaaaacaccgtctccgccccttggcctcaccctctctcagtccaaagaggtggcggtggctgggtgggtgggtgggggcccggggaaagtctagagcgtgctcgaaatctcttgaccctccggagtattgactttggtcccaagaaattgctcgcggttgctgggagagtactggcggtgggctgaggctcctggagagcccgcggggtggagatgggggtcggccccccctcggcgcccagccgaggagcagctgccagttgagtgcggacccgagagagaacccccgagggacacccacgtctcccaccgcgtctgcgtcgggcgttttggtttcaggaggctgcttcggggcggggcccccgggggccgagcgcggggggcggcccggcggccttaccacacggcggcttcgttgagctcggggttgggatgcgacaggggtccgctgtagccgctggtgccgctcattgggaagggcgggctgggcccgccgctgaatacctcgccgggcatggggtgcagcgtgcccggcaggcctggctcggggctcggtgtgtccgggtgcgagatcatgtcggtgaacctggggttgtccgcggcgtgcgggccggcgagcggcggttccagcgctcccagcggcgtcgagccggggccagaggccgccaggaagctggagtcggccggggactgcgcctgcgaaggcgggccgtgcgcgaagaagtcgtagttgcttcccggcgcgtagtagtcgccttggtagtctgcggagggggagcgggaaggagacagggcgcggtgagagaaggcgaagtaggcgggggacccgggacccggggaggggacccgggcgggcgagagaggggagcgcgcgacaccgacccaaggttagagagacctgcggaggccggcgccccttgagacggtggacgtcgcaggctcacggggagggttggggagagagacaatgagagatctcgaaagggcaagagactcagactgccagagaccacacacagagacgggagagactccgagaccgtgggggacacacgcggcaaaaactcggagacttcagtcacaggttccctgacacctagagatggagagagacagaggcggccagagacgcagagacagacaatgattcctaagtgtcttagggtcggtgagagacacagagatgcgggacagcgagagacagacggagagatcggcagaggggcagagagaaaggcggaaaagagacccagagacgcggagtccgcggctgagacccgaaagcccgagacatcggagggtcgcggaggagtcgaggagacgcagagagaggaaagacggccgcggttagagacacgcgtggaaacccccgggggcggcagcgagggagtcaggagtgagcccgaagatggagagaagtcgatgcgcccagagaacgcaagacggtggatcagagatgagtcccaggaacctccagagaagcggaggctgacaggcccggggagaggaaccgggcagggacaaaccagcggacagagcagagcgcgaaatggttgagaccgggaagcgacctggccgggggaaactggatccgggccgcggcaggagcgactggtgggttgggccgggcggggcggccttggcgccctaaactcggtccctgcgccctaccaacccagtccaagtccttcgcctcgccaagtacggccgccgcgtcgatcccggtgagaccatttgtaccggcctagcctagcctgagaaagagaaaactgagctccagcgacttgggagagggggaggaggacacgaagattctctgggtcatggccagagctccgcgggctccttggggtagaagctcggtcctccagccttgccccgggttggttttgccagcacccccaggttctgaagcatctgaggacattgagatcttttgagaagctggtgatagctatgggctctctctcaaggaaaatgcaaggatgagaattttgcccataaattcaggaggtgtagggactccggattgcaaacccattctgcctcaacaaatctgtatcaactctctgaccgccccacatagccccttttccagaaccttcgggatatcctgccttcccccaccaggtggggccctgaaggactgacgtgggggacgtcacgaaaggaccaccttgtaccaggcacccgctttgtacggcgggaaaaccagcgagtccagaagcctgagtctcttctgcaaatccactccccctgctgagtcctgggatctcagtcaaggggcgaattcctgatgccccctgccaccctcttccctctccaaaccctgaaatctgtccaaatggggggtgtctggaggcgtggcttggaggcagtttaagcaacagctaaaacggttgccaattactttttaaaaccattaatttaattctccccgaaagtgaaggggaagatggggagcggcaaatttggagccccaaagggacagggatgggagacggccgcggcccgcggcgagccggaaaaccagcgaaggccgctgcccccgcgccgtgcgcgccgcctccgcccatatggcggccgggccggaggtaattggaacaaacgccgtctgaaaagggcacaaaagccgcagctggggctttgtccgcgctcccacggggagccgccggccccgccgcccggcccctttctcgcccgctgccggtcgccaccgccgggatctcccagcgcggattaggcggggctgcctcgctgggggctggggagtcttccccaccattacggggaacgaggggcccccagtatccagctccccacctcatccagcgcgcagggagaggaggcggtgggataggtcggggcgggggcgaagtggtcctcggggaaaccttggttaattatccaggcggggaaaaattccgggccggtaccgcccccactacctcgctgctccgggcccagattttgtagggaaagaggcaaatttaggtggagagagtcggtgagtggagactccggaagacacgcccaccatccgggctctccagggttgggggtctgtccggggttgggggtctgtccagggttggggggctgtccagggttgggcggctggggcgctccagcctgagccctgccactgcctggggtctctgccctgaaaagcacagcctggcattttgcccacaatttctaggggccccggtccggtctcaaggtctaatcccccctcaggcttccggatgtgctgaggttagtgatggggttatcttcccttcccttctgcgtctacctgggtgcctagctcctgccttgctaacactgccactgaacccactttctaagagaaattgcctcttcctaacctgcgttacaactcagaagtgcagatgcctctcagacatagacagtcctggggtctctccaaattcagaagcttcagaatagaagaggagaggtgctttcttgagccctcagccctgggaagaacaggacagtgagcttggtgagctcaagcaatgcggctcagggtaaggagctgaaaaaatcggatagggggagttgggatggctcaccaatccagtgtgagggaagtgagaggaggaaaagctgaggtggcaaggggacagctcaccccaggcccaagcctggtaccaccatctgaagccctttgtaaactggggctcctcgctctctgcagccccaaagacggtggaaatctggggttggcccaacacttgtgcccccagtctgtaggaaccccaggggtctcggggctggagggtggactacagtcctgcccagagcaactgccggcatttgggctaacactgccagatgctgtgcgcacacaccccgccacatggaacaggagttgctgccttcgatgctagtgagcaggcggcttggaatgaatccagacccccatcccctcccctcacactaccctccagcgctcggaatccacctcatgccaagtacaccaggcacagggcggcaggaaggctgtgcgtctgtccgtgggggccgcatgcatgtggatttgccagtactggcctcagtgtgactggtgggagtgtgcgcgtctgtggagttgtgtctccgtgagtgtacctgtgtgtgagagggtggaatttacctatacgtgatcgtgcgatcgtgtctagacgtgtgtccctggagtctctgaacgcaagtgtgagtgcaccttgtgccctgcgtgggtgaatgtgtcactgtatctcgtgtgtgcttctgtgtgcatcactgtatgggtgagaccatgtatctgattttgtgtccaggacatgtgggtgagtgtacatgtgtctgtgatcgtgtgtccagcgagtgggcgatgttctggagcggcggaaagcgtgctggccgggacccttcgccctcagctcccggaataggacaggtgcggaacagcgaatcccggggcgccccttacctccgtagtaggtgtacggggtggaccccaacatctcagactcgtccaagcggccgcccagcggacgcatgcgccgcggactccggaagaaggcgtgcctccgggcgcctagggcgctcagctgtttcatccggcgttctttggaccgtcggttctgaaaccacacctgggacagaggagggggctgtgaacccaggatcaggagtgtcctctccccccctcttctcccttccctgactgggctgcccctgctgggtccttgcgcctcttccgcaccaggactcccccgaggcggggccgggccggattaggccgggaggggtggagagaggcttcggcgaaccagccaagggtgaaggatttcgcggacccgtggggcgactcataaagacttgggcttcctggtccccggctcgcccgcggcctgacggctctataaaggcctccctcccggcacggctctcgcctcggcccctcggctccggagccagcctctggccgtttgtctgcccgcgcttcggcgcagggagggagggggcatcgcctgtttctctgctcgaaaggtggaggtaaagagggatcccggaccccagagaggcttacaaccttccataagcaaggcggggggcggaattcagagaggtaaagtgacccgcccccaaatcgcaataccaggaggacagcagggctagatggaatctttcggttcacagtccccgacctcgggcaagtgccccactcgggcgcacggtctgctcccagaccagaaccaggcgcgctcgtagccaaggaagcttggcgggagactcctccgaggctcccggctcccaggccagcggggctaaggagctgtgcccgccccgggccgcacctggatgacgcgcatgttgaggccggtctcctgcgccagctgctcgcggatgtggcgcgtgggcttgggcgtggcggcgaaggcagccttgagcgtctccagctgcttggccttgatggtggtgcgggggccgcgccgcttggtgcccgagttctgctcctcgttctcgttgttggccgtctccttgtccgacgaggtcgagttgtccgtctctttggggtcgtcctgcagtgcgtcctggaggtccggggacaaactgcggtccgtacaggatgacactgcgggcggacggatcgggaaggggacagcggcgtcagcgacggccagacgcctcttcagtccagtggcgggttcccgccggcccaagctacggcctgcccaggctacggccagccccgctggattccctcccaaacctgcgacagcccctcccccagggacccggtgcccgcccactctctccaggcggggctgggcctttggaggggcgctcttaagccctctccgcgcgtctcagctagtacctgggtaagggtagggggacgcgtaccctctggagaactcccactttcaaggagaggggacaaggagggcacagattcccttggggcttggatcttcctctctcttccctcctctctccagacctcaattaatgtccttccagtgcatcaagaaattacctggagctcaagtgacacataagggggaattgtgcgcttccaaattaggggaggagggcaacttggaaaaggctcctgaattggaggagggtgaggcagagctggcaggtctcagatcccctgtaaaacctgctccaaagccacttctcttctctagcctctaacccccttgccttgccctagaactgcctggggctgatgagctccaagctcagcacagacagcacaccgggggccaagtagggagtgccaggctgggcacggtgggagggtgctaaggcctaaggctagtgaggggcccaggcttcctacctgagttgaggctgccctccttgaggctggatgagctcaggtagtcgtctttgcacacgaacttgttctcgtcgatgacgtagagctcctcgccggtggacagctgcttgttacacaccatgcaggtgaaacagttgaggtgaaagactttgctccgggccttgcgcaccaggtcgctgggcgagatgccttgcgcgcagccggcgcatttcgtgccaaagcgcctgtggacacaatgtgcctgtcactatggggtgggactgcatccagccctccccagcccctgacctcttcccacccgacctggcttcggtgaagtccccatttccatatctgtcaaacggaaccccaatcctgagcgctctggccagagtgggagaagtgggacaaatgtcctgagctgcttttgggactgggactgccatgcctccactggggcttttcagactctcctgagctgggaaggggtgagcagtgggtgcagccttcagccaagaagagagcccagagcaccccaagatgtcctcccccaaacccaacccctgccaggcctgcctgggctgctccaggcaaactcagagtccatgaatgatttgaagccaggcggggagggtttgggccacttggtggctctgcctcctggatcctttctagtctgctgctgcctagctagggccaatctgcctggctggctgagcctagccatgaggtggggagcccttctcctaggctggaaggaggaagcagaaaggagggaaccttccactgatttccagtaccaatggagaggctttccaatccaccgctctgggacccgctggagctaatcaggagctgtggacagcagggcctcatagtgatggaccctagagagcagggatgagtttcagcccccctaaacctctggcctggcaggcagcaggggaatgtgaatagaggacaatcatagatcctgcaaggccaggacaggaatctctcaaatccccgctttcccgcgttcctgatctcattccttttctttcttctttgagctcagggagaaagccagcctcccccgaaataggagatgggtgaggctcaggttgggggtggggtgggggaggacccaggactctagggaccccacatctactcacacccatgtctctaaacagggcgaatttgggtgacattgatgtagtgagggcattagaagccataagtcacttttggccttatccggcagcgtaattggccatatgcaccttatcaaaaatcattaggcactttgcaagcactgctacattaggggcatcgggcctccgggtccagggagttaacacgtgtaaaggagcggctgacattttctcccattcaaattctcagtgcggagtcgctggggccggcaggctgcctttctctgtggcgtgattcacgcccccattcctcagcgcggggaattcctgttcacaaagccggctctgggtgcccagaggaaacaggtagggctcagctgccccaaactccagtggcttccaggctggggaaactgaggcccagagaggtgatctgccctggccagccacagggcccacaggggtaggggggctggggaggtgccacagcccagtctagaccccagaggtcctgattctcagcctcgatttcgtttctacttttcaacatgggaggaaatgtttaaggggttgggaggtgggtgggggaggttctctcctcccatcaccaggggagaccttcctcgctgggccccctctggagctgagaagtttctgtttgggattgcggccgatgggctcacacattctgcctggagcgagaagccttcaggcgtctctaactcatgcaaaaatccttcctctctctcgggacggggcttgaagcttctgtcttggggttgcagctgcttggaaggggcggagaggagtggatagcaagtttgtcagggcttcctccctctgccccgccagcgctctgagccggcctcgagccaacgtgaggcagcgaagcagcgtccttcttcctccgcctgggctcgggacctttcctggaccaaggacaggaggagagcaaagtgctgcccgctccccatctaagcttgtgatccggggaggctgggatggggatgggggtatccccttccccagcgccccagtggagcgcgcgcagggtgggcgcgcaggcagcagagcggcgcggcctcttacctgaaaaagtcatttttgcagtagagcttgccctcgcgcgagaagcacttctccgagaggttggttttgcactcgcagcactgaacacatttgatgtgccacgcgcggtccagcacgttcagcagaaagcggtcgaggatgggccgctcgcaaccggcgcagtgcaccatcatagccccgcgccccggcggcttcggccgccttgccctccctttgggcccctggccctcgggcctgccgggccctccgctgcccttcgcctcttgtctcagcagctgcagggcgagtctggtccggaccaagactcagccggtccagtccttgggcaatctctggcctggcgctgggctgcccggagtggggtggtggggggcgggtggcgttcacaacctcatgccacgggccgcacgccccggcgcctgttccgggcttccccaggtatctcgggtggctgctggcctcggcgctgcggagcggctttccccggtggcggaggcgccggcactttcccccactttcaagcggtccggatcctcatctttgtctggtcgccgcgtaattcgcgcatccttattcagatttggtgacgtggcgctgcacgtagggggcccagcggccaatgggcgcaccgtggccatggcaacctcttaaatttatagcatatctaaattggctacagcgttgctgtccggacagagcaaaaaaaacaaggcatcagtattgttgagtattagcttgtacctggttcggaggctaagtaagtatttaccttccagtttggggctgacggggcgggggcagcgcgaaacgaaaattgcgtctctcttcctctctctttctcctcacaaatatttgggggtcacgggttccaaggcctagtccgggaggtacccctgcccccttcgccatccctggaacttgcagaagttgccccacgccccacacttcgctccccttctccagcccagccagcccagattggattcccccacccccgcgccccctctgcgccctgaagctgcgtcagcgcggttctcccggctcctggagccggccccggcttctttttgtcatacacggggctggggcccagccgggcctttctcatggagagagctagtggagaccgcgcggcctgggtagttttccccgcccggccgccgagcccaggcccaggcccagggtggggaggcgggggagcaggaggggtgccatttggcctggtcccgaactccagagtttcaggcctgagtgcgctgctcacggggctctgagggagatgtggacagggggagattcagggtggacgggtcttcccgcagacagctcggaggtggcactcaccacgtctctcctttcctcgctgcaccttccagattccaggtcagcctatggggcactgtggtgagtgggtcgtacggctgaggcgggggacaccagcgactatgagagcgctgtttgtattcacgccgtgcgggctgggtgtgcaagttcgtcccctcattgggcgcaggagaagcggcgcacgtatgttccgtgctcggcagggcgcccagagtgtgaggagagagagtgtgtgtgtgttaagggggaggggggatgttggcaggtgtgcgtgaggagggggtgtgtgggtctgagtaggagaagggaccaggcctcctttcccctggggccagcgtggccaccagggatcctagttggggaagccgggaatgggcaaccaggatttgcctttcgcttctggaaagggggctgagggagtagggcctgggaccaagggctggagctggaggggtttgtgccagcacttggctgtgaatgtttgtttgggtgtgtttcctgagcttgttagtgtatactcgctgtttgagaattccatttttgcatctgtttattgtgttagtaccatcaatcctgtgagtaaatttctgcgtgtgcgttttcgtgtgtgcagattcgtgtgtttgtaattgtgtatggtcctgctaatgtttgtgtttatcactgtgtgcacttttatttttgttggtctgtgcctatgtgtgtttgcttatttgaggatgcataaatgtgagggtgttttcatgtgtacgtgtgcattcacgtaagagtgtttgtgtctgtgtttgcaagcattgatgtgaaggtgtactttgaaaaatctgaatgtgtgtgtttgtgtgtaggtgagggcgtgcatgcttgagaccctgtgtgtatgagactgagctggcttggttgtgt

SEQ ID NO: 319 - DNA, 23080 bp, Homo sapiens
  source 1..23080: mol_type = genomic DNA
cgcaagcggctgggaggcaagcgggcgtccccccacaccccccccccactgcgccctggacccacgccacgcaccgccaaggagtagctatggtggcacgtggaggaggggcgggtaggcagggcggcaccatcaccgggaccagcatcttggaacggtcaatctcactgctcatactctcctccctaccggcgcgggagccttgctgtaatcccctgccaccccatctccgactgtgaggggcgcaccgggtgggggaatgggtaaataactggcccaaggcccagcttccaggtcctccctccactttcccgcggcctgactgcgccccgggcaacacagccccttgggaacctgcgaccaggtaatgtggcctccgccccgtcccgggtctggctgcatcccctctaacccctgcctgcccgggtccaagtgagggttttctcccggaaggttaatcaccacccccatcccctagccgggtcccgggaggaagagatgccccggctctctcgttgacccggcctcgaacgccgacctcgagcgcagaatactcccgagtgctgggttcctgatacccagcccgggagcgaggggagtgaaggagggaccgggacaggaaggcggggacgcggtgggtgaacaatcaatggcttagcctagtttccccgcaggagctaccgcccattcaccgtctatgcaagcaccagctggcggcagcatcttttaggtacaagctgcagggaggcaaaagctggctggggggccgggagcccagggcacgccgcgggactccagtccccctgctgcgccccagcctcaagacgctctgggctttatgaggttcagttaccgccgagtcctccattaacacctcctctgattattgagaggctggaagggctgaacgcaacctcagagcgtttctctgggcaccggcccgcgtctgtgccctctgcccaccccttcctcctccccctcccgatttggaagcataaacagaaaataaaagacaggtggagagagctaagggtcagaggtgagggaaacagatcaactccaacggggtgggggagagagagaagggagaaattaattttcatccaatgctttatttatttatttggattaacagggggaccctcagcgagacgcagggactggcccgcacctctggccgccgcctcccgccgagaaccgagttctagttggggaaacgtctgacatctggacatcaaggtaagaccctgatggagatattttagtcggagcagttttctgccctcggagtgcgcccggacgcccgggagtttcagggacttcttgggagcctaccggaggaaggcccggctttgctccaagccgcgtccctacctgaggtctccacgggaggagcggtttggacgcgccccaccggatgggaggaggtgcttggggaagccgggccgtaccgccggtctgactcccggcttttctctgccagtgcaaccaccattacggcgtgatccactccttttcctctaagaatgctgaacggtaccactctagaggcaggtgagttatgtgccaggttccttctgatgttctctgccccttgggccagtgcgtataccatgtgagtgtgtgtgcgtgtgtgtgcgccttcgttgggtggaacgaagaggagtgtgtgtttgtcttaaaaattaaaccgcgcttcgtaggctcaaaaatacacattctctttcagagtctcctgataggactcctgaaaccctccttttgcctttctctttgactgtctttgactttcctcaggatcagtgtccggggcgccaggcagaggtcctggttccactgatcctccagtagtcagtggctccagggacgcgctcctgaccctccggggagctgctgggggtgtctctttcttggaagggatggaaggggggccgagaagacactgtttctcacacgtgtaggggttaactggaaactggcttcacccacatttttttgttgttgttcagtcctaacccagcgcagccgtttctgcgcctgatctcagcggacgcagtgcgggacttctccctttatttctgcagagctgagggcaggcggcgcaacaaatctcaggtaaaagagcatcagatttcagaagagctgtattctagacttggcgcaggcccctttggggagaagagcccaggggctatagagaacagaggtttgaaggaagcaaaagctggcgagaggttttttttttgtcgcgaagggtgagggtaggcagagaacgcgcgaaagggcagggccttggccgggaagtaccgcccagcgaaaggctggcaagggtgcgcagctggagcgtggcctcgggtacccctttccaggcagccgaactccccgtatcccagctctgcttggctgactcccatttgtcttgagggaggatcccctagtaggactgaatcagaagtgcgcccgtgcagcagccccagtatggatctgccaacctcagtgtagggggaaattttccacatggagtatctcagtctccactgtctggagaaaggccccagcgtgtcccggcaatccgctcaccttccatccagcgcagcccgggcatccagggccaggtggcgcggcactgaacgcatggttcccagcctcaggctgacgctgacgtttcactgggccttgggtgctcaggacagtgccagacgctggatactgttttaagagccgcgcctttcaaaccgaaggggctccttaaccagcttaacagggtctggaggaaaggtaacgcctccttcttaaagggcaaacttagaggcgcagaatcatggcctccaaaattcaggtagagagagaccttaagtcacctttgctctcaaaatatgcacatttgttgggttacttcttccctctcaaccctaactgttctgtgggtttaatttccctttcctcccccctagggaattctactgggctcgggttctttgcccatgtagacccacctgagccggcgacaagggcgctgcagtctttttgaccttcatagagattctaagatcccgaactctcagttccaactattatgctccactatagtccggccgtccactttcctaaaagcggcaacagtagcgggatgggtgctgtcagaatagaaaggaaagaaagcttagtggactgcgtgtgctcaattgtgagggagagcagtgctggtcaagggacctgccccattatacctggtagaactttgaatttagaggagacttaagatcttatccccgacgcaggctagagagaaccacatgcacctgtccctcagctcaggaactgaaaaaatgaacactgtaatttttatggaacacttgcgggccattcagactacagctgggagaagggggaacatttttttttttgtccccagccaccgggcctcagcccctctgctggagaggtgaaagaaagcagaggtacaaagatgctttccttatttaaagtgcttatttaaagtcctttgagaatgaggagcggggagctcttaggcaatctttcttgggggctccaagacaaaaagagtagaaaacccagggtcacacacccaattcgagggcattccttcccacccttcctgggcttcctccttaggaactgtgagagaaggcagggctggacccatggggacgtatttccgcagagctaacaaggacctcccaaactccagctgacccccaccccacccccagctttctccagacttcctgcgttcactgagaaggaagaatcctggcagtttgcttctttacaggaagtagcaaatgccactggatgcaggaacttataacctgagttttataagagcaggaatagctaggattcaacttggaaactgattgcagaaggtgttctgccttgcctgtacctagatgattaacaaacttgtgtggaatagaagaatgaatggatgattggagggcttacaaaacctctgtgtttggcttccctggagacgctgtaaagttctggctttttcctggagttgtttaactttccctgcatgcagtctccaaagttttatctcttgcaaggaagcagtggtattcttgggttcttcattgttgattttgctgagcaggggcaatatgcaacaagaaccaaacctaatttcaaacacccccatttgggggttgggagaggttttagcacagaaactagacaaagtaggttgaagtcctgtatttactttttgcttggagcttccttgggtgaattgactgaggggacttctcagagactcctcctcctcctcctctttctccctctcctcctccagctctgagccagtttagcctctgacttgtgtgaaggcaatctgcccttttgtgagaggacctgctgtctctgaaaggactgctgcccccagcccctcctcagggcccttcttgtgtgcacgtgggtttgaaaagctcattgattcccatccaaaggggctaattacattacttacagtaaatagcagccctgctgtcaggtatagctgccaaagtaaggaggagggggatgtctccagcttagttcacttgattggcttcatttttgtgtgaaattgcgttttatgagctgcattttggcacccggaggacttaaactgcgtccagtctgcaaataacattatttttgaccctgagaaaaaaggaggggaagcagtagtgtcttcagtttcatggaagaggtcactccaggagcctcagaagacaacgctttgggacaggaagtcaggctgctgcaccaggggtcgtttcctctctcgctttatttctgccttccttccttccccttcttctcatcctctcacttctttttttctttccttcttccctctctccctctctccctggcttttctcccgtcatctttctagctttggccacagttcccggtcgggctcccccgggcggagggaagcgggtctgcggccgggcggctcttgtgaggtatctaggatgtgccaggacacaggcaccgcagtcctgggaaaggcggcgggaagtagtggggaacgcaggctgacgaaggggacggaaggaacagagagcggccggcgcgtcctcctctctgggtaaagccgcgttggttcctgccgcagcgctgtgcttcggactcctagggggcctctggccgtttgaatgaatcgacaatatcagagtattgtggacactttttaatggggccggggaggggccgccgctgccgagaactgagggcgacagaacaatcccacctcttgtgaggagcaggtctgccattctgcttgtcagttctcaccttcccctcctccacggcaaagagtccctttcacacccttctgagtgtgcgggtgcgcccagttttacaagtcctctgtcctgccagggtagtgggagaagcacgcgatggggctagcgcccagtcctgcgggggcaggcgccaagctcccgggagtccgcaagtcgcttcctatattggcaagcttcaaatgagacattagaatctccggcaaccttccttcaaacctgaaccggggaagagaataagccgccctatggccaaggcgcaattgcgtacccgtgtgtacaggtccatgccctgtcccctacactctaattttctcaaagaaaattgttttgccaaaagtaaccctgagaaatgcagacgctccaaacgccctctccacttcggatgaagccagcatctagtagggtctccggccctcaagaaggtgaggcaaagagatgaattgtcagacagctgcttttaaaagtggattgaggaagatgggatggggaggagaggaaccagcattatctccacctcagtaaattgcttacatttctgctcaatatttatgcatttcgggtgacagtcctgcaggctggggatgaaaaagtccacaaggaggaaatccaaagtttgaagttgatattctctgtgtcctgagccaaggtctgatcttgaactcggatcaaataggcgggttctaggccttctgcaacagggcggggacaacaagagctccttttcccctttaaaacatgactgctgggaactcttggaaggatgtgtgtgtgtgtgtgtgtgtgtgtgcgcgcgcgcgcgcgtgtgtgtgttttgtggggaggtaaatgccccctcctcctgcctccccgctctctatccccccacccctttgtaatgtttgtcctgcttgcccatcaccagggggttgagaggagtatgacaggtctttgttgtctgaataaaaatccgtggcagctccggggagagaactcctcctactaaattatcaaaaatgggctggctttagtctcttaacaaattggacacagctcaggcaggagcagtccccaacccaatctacaggcactgggaacttgcaagcagccagggaacgctgaaaatagcacgtctttttctttctttgtgttcaaaactattttctttcttcaccagattttgttttcctccccccgctgcagttgtttcccattagtaactcgatctctcagagcagtaagattcgccttctacgcctctttttccctccgcccgaattgtttgttttctgcacatctccttcagggagccgctgaggcttccccccaactcttcccagttctttttgcttcccctcggccccccaagcagaccgatttccactccatctgtttcttctcctcctttctctccctctttccctccatcctcgagcgtctctgcgctcctacagggcagccctctctggtcccttgcctccttcactcggatgagctgaaagccccgggcgtgtgtatatggaaatagtggggtgccgagcagaagacaactcgtgtcctttccgccccccagccatgctctttcacgggatctccggaggccacatccaaggcatcatggaggagatggagcgcagatccaagactgaggcccgtctggccaaaggcgcccagctcaacggccgcgacgcggtaaggaagggctccgccgcggcggtagccgggcacccctgcgccctctgttaaaccaagccgactccctggccggtggagaaccggagcggcgggtcgtagagacgtccgcttgagggtggcgggtgagttttctcccgtccacctatgcctacagggctaagaaacggtcgtttttctgaatcgaaatgtctgcagctggctatcctccgtcgcagctgattccgaaagagcagggagaggaactgggaggaggtgggatggggggtggtggcattctcttctacagacctcaaggttcccttgattccggggcaggcgtctccccggcgaggatccgcagctccgagggcaagctgggcataagcaataggaggacggcgcgctgccgaggcgtccgagccaagcaggagcccaggtggccttagtctctgggcctgatgaccggacctgtggagtagattccgacgcgactgggtcatttccagttctctagacgctcggggcttgggacccctaaccgagagaatctcagggtttctggcatcccgactcagtccctctaaggagacagcactacgtttagcgccaggacccggcgggtgtcatgtgtagggggaaatcaaataaaacatacggaggagcgcggcacccagtcgaaacgcatgaactttataaccaacccttaaacaagctaatcaaccaccactgtttctactatccataataataaagtcatgtcctcttaataaagaaaactaattacttatctaagcgcttccctttccagattactaacggggggggggggggactacagaagtctccggaaattatttcggccaaacatagctgtgtagatcctttggtaccacagtaggacttgtagcccaaactaatcaggagactgctctagcccttatcagctgggttttgggtccggccaagtagcccaactggtgaacgtgtctatatttgtaacactcattcagtgccggggcccctggtcggagtaaagggctaaactttactttttcaggcccgctgaagtttcgtggggaagatcaacccatttctgctagtcgtgagggaaatgtccggaggttaactccttttccctttttctggtcatcacttttaaaaacaaatagtagcaacccaaacccaaattttgcagcggggctgggctcctcaaggtggggccactggggcatcccgagtcgggtcagtgggacccagagggaagcataacttgggcactaaacagattttcaagacaaaggtctcagtacgcctgttgatgctagggaaagaggggactgtatacagcgggctggacagcggaccctctttgggaacagccactttacacatttattgggaacggcaccaatagccctgaaaattagggaacagcaggggctgccaaatatatctcaatcaaaacaaagtcgaccaaattatgagcagaggtccaataatctcccctttgcttttgatttcaatgctgcttataagaatttagagaaatcgaactgtaatattttttgtttaaaaataacctgtgctcgttgaaatttccttttcactcccttatcatttccgttgttttattttgtgtgcgtcgaaaaccacaatttttagcttgtaattatttgaattcggaaacgatcaccaaactgtagtcaatattttcctagtcctttttaagcgaggctccggatggctgggatgtctttaggttagtagtcccgggaggacgcgaacgccggttcaggcagacacggaagaaagcaagcgggccgcaaagagagaaatcacaaatgtttcccctgacttttgcctttgtgcagtggaccctggcccctgccgctctccctgcacaccctgggcttggtctgcctgggggagaaccccgcgtcgtgcggctacaccgcgcgccctcctcagccttgcggtgtgctttctttgcagggcatgcccccgctcagcccggagaagcccgccctgtgcgccggctgcgggggcaagatctcggacaggtactatctgctggctgtggacaaacagtggcatctgagatgcctgaagtgctgtgaatgtaagctggccctcgagtccgagctcacctgctttgccaaggacggtagcatttactgcaaggaggattactacaggtactcccctacacccccacttcctacgcccgagtacacctggaggggccatctgcctgagcccggaatcccctctccgtcccctaccttttgccccattccgggtgctgttatcatttcggagaccaggcaaacccactgcatatgccttcaagctgtaatctccctgaccgacggtgagggtgggtgggagggacattaaaaatctagagctttatcagcgaataccacgcactcccatcacttctcagcttggctggcggaacttggggaaatctggggaagagtaaatggacgtggtctccgtctaccgagacttgattgggtgtttgttttccgcttgctacgaattgggcaagttctgcgccttgaaactgaactagtggctcgggcagcagcaacagagtgttaggttttcgtaggtggcaggagactctgtaaatgactatgaaaaggaataaatgccattgccaaaacccaagccactcagttccgggttccttttatcgctagttacaaccatgccccccagattggagaaaatcagcagcaggcgtctttattgattcttctcagttatgtttctggattgggaaagacaggactaagtgcaggtgacctagttccgctctcagcccaagcaagataagttgttaaaaaaataataacctttcctttacaaaatcgtcatcttccaggactgtgtccgcatgctttcccacacccgcgcacatccaggaataattatatcttctttcattcatatgttttgtaattgattaagtgttttcacttggcatggcaatttaatattctagtaccgtgagttagctagtgctaactagtggtttgcttttttaaattttttttaatgttttaaattttcactttgcagagaagaaaactaaggcttagttgcccgattcttctgactttaatgtaaagatcctttgtcttggtttatcagaaaaggtcgatgagcaaataaaattaatgcctactctcctgtccccctggaaccctcccaggtcccagtctcaggccactgcagaccaaacccaggtgtcgcgggtgggatatggctctgccttgcttcaactagcgccctgactcaactctttccttccagaaggttctctgtgcagagatgtgcccgctgccaccttggcatttccgcctcggagatggtcatgcgcgcccgagactctgtctaccacctgagctgcttcacctgctccacttgcaacaagactctgaccacgggcgaccatttcggcatgaaggacagcctggtgtactgccgcgcccacttcgagaccctcttgcaaggagagtatccaccgcagctgagctacacggagctggcggccaagagcggcggcctggccctgccttacttcaacggtacgggcaccgtgcagaaagggcggccccggaagcggaagagcccagcgctgggagtggacatcgtcaattacaactcaggtgtgcctcctatcctcacccccggcgcagccccggcctccctgaggaaaattcgtagagctccttccccgtccaaagtcttgctgcaagagtgtgttttgcccaatgcctctgttctcactgcaactccctctcactctgaaggaagggagagagggaggaggaggggggaagggagggagaggcagcactttatttaggttgtggcaaaaaacacattcataactatggggctgtagtgactttccccaaacaggcagagccaaatccttgttgcccattagttaatgagcccattagtttctggctctcagttggagcaaaacagccccagggcaatttctttgtggaggccaaattatagatcctgtaggaggtttcctaaatactgaagaaaaaaaaaaaagtctacagagcccaaccctagtctgtctagaggggtcagaggctgtggtcaccagcccaaagttaatcaggaacacagttggcaagagtgttgaaaaacctaatccctgatcttggcaaaaagcagttgtaggggtgggaatcactctccacagctgagctagcctgtgtctttcctaagccaggatattcaaccagccgtctcattcccggtgtgatagaccatccagacatccagacccctggaactgaaagtacctccaggtcaggcctcctgaagaggcttagtggtatctcaggccattcatctatactcaaccaccttctctcttcattaaaaacaacatgcagacaacaagtcaagaacacattcttccttgctttgggggacacgcctatcatgtatcaatctctcacatgcagcagtttcccattgttggtagcctgcccccactccccatcctccaggtgaggatggtgatcggctctgcagatgataatctaactctgagcagaacagaagctattcttgtgagtcccaatcactggaaaaaaagaggttgtagaaagccctggcgcacttttggggagcctaaggaccttaactgctttggctttcagtgccctggcccacatgtggctgagaatctcagcagactcaggacaggggagaccattctgttggaaggaaccttgaggaccttattatggcaaccccactctattactatgaatgcccccagataccaagcatgggcatctcagagcatgggatcttgcctgtttttctcttccagttcccagggcctggtatggtgcctgacattgctagtcaatggtaaagaacagtgtccagccagttaagtgatttgcccaagatcacacagccagtgtgaatgtgaagctaagagtcctgctctgagtttagagttttcaggggaacccacacaggatgagtggccgctctctcagacctccgttgggctctctcctggggttctctaccgactgatctaactgaagaggagaatcctttatgggcaagcacagcgggtggccttgcagggagaatggggagcaatgaggaacactgtgcggcagcacttgtccctagggggttcataccagggctgctggacgaaaagaaaaggacctgccggctcactgcaaatctcaccagggtcggtcaatctgtgtgagggcagcgggcgaagccccgggttttggcaaccctcagtagtggccatgccctcacactggcccctgctgtgctggggcaggagatttggttaggggccactttgcccagcatgcttacttcatcttctttgatgcgtggtccccggggcagggcaggcagggcactaattgttctttattaatagaaggtgacattggaatctcaagccactcaccaaggccctaattcccagagagagagagagagagagagagagaaagcaagccactcatacataaactagtgagtttttttttgaaagaaaggatctctcagcccggataaagtccagaagggtgaagatttctagccaaatagtaggcaagcctgactttttgattgtttatttaatctaatttgctaaatttgatttcgccttggatcttcatgttagatccaaggagctttaagaacagtagaatttagattcttttacttctctgaaaataactagagagtacaaatttatttttaagaagaataaaagaatccttctgagccacttaggtctttagtttgcagattaatgctgctacaagttgttgtggagaaggtcgcttttgtcttggtcccaaaggagggaaaaattgcttaggcccccttagcccgaagagtttgtacctcgcaccactacaaactggatgcctcttagttaacatctactccatcctttctggacttttcccagagatactattcaatagtatatatattttaaagatcaggttaaaattatctatgggaattggtttgaagatgcctgaccagaaatcaggccatcatttaaaacagtgcttgcgaatctgatgccactttgttccaaaactagggaaagaaacccttcagcaaattaaacacgcgttaaaatgtaaaaaaataaaataaatccagttttaactcgttattttagccttctttggattttgtcttgctatctttcattaaatgtaaacattaaatgtaaacaagtctcataaagggtaaggttgatactaaactaagtataatttacacaatatgttttcaaaatgtgcagaaaacatgtttgtgattcaaagaatctcagagaagatgtgaaacttggcaaaggccagctagtgcttgatagggcaaatgccttttaatgagaatgtccctagttttgtttatacctctgtgcaaattaatcaggcaaatattttagaaagagacatggaaagtttacctgaaatgctagcttgaaataaagccctctagggatgagaagaagatttagtttaggataggaagctcttatttgtgtaatttaaacattaattgagagattaaacttttgccacttctcaaaatatcctttccttaagccctttcttcctatccaaacttttaaggctcctggtggttaaattagcctggcactgacccctagtggtcttccagggatcacttcattctcagaaggttacataccttcacagcgacactcactttaggatgggtgcccatcgcataagtgactggaaataaaatacttagatcttctcattaacttataatactggatgtgaactgacaggtagatatttaagacagttttaagagttatcatttcatctcataattcggggagtgggggaatcccctacagctttagcaataggccttggagaaacagtcatttgcaagtttatataatgcatgtgtagttaaacataaataatatcagataatgcactgttactctgtagaagaaatagctttctctattaagttgcataatatgagataacagtcacaggaaaatcatatatagtaatatctgtttaataaagacccaacgagctatctccttacatattggattgtgtattttatgtggaaacagggcctataactgtattttacacactaaaaggctctgctgagtttttaatcagcaataatggatatagaatgcgttttaagggaagccatttcattaaatcttactacaattatttttcataaatttcattttaagaactaatgattatatagtcaggttgggaatcatattcatttctatatattaccttggtgtggagtgggggaaagatggccaagggcattatttaaacaccaagtcctctgtcccaagtgtgaaattcaatttgatgtattgttcaggaaaggttacatgttacatatgataggaaagaaatctgagttgaagaaccctccgatgactaacatgtgcccctttgactattttttgtgggtatatttataatctggttatgaaatatggctgagtttactggagataagtatagttttatagtaggtcatagagatgctgtttcatccatttgaggatatgaaagtgcaattctgtagaatatttgaacttgacatatccccactgggccaaaataggataaaatgtaatgcatactctttctgttatctctggacatatggtagcctttctggtggagtttaggaagcctatgttttacattcgaatgtatatatctgacttggattccacttcaagttgatttaatttcgcattaatactcacttgtaatttactgatgaacaaagggcccaacatcttgattgaatgcttcttgagctcctacccctgtgtttgactcagggaatcaattcaaagttgaatatggtatagtcagttccctcaatgaactcacctgttcttttgccaagtgtgtcctcctacttatgcgtcttatggaaatacaaacaaaggagacatttgtttgtgtctagtctttttacattaggaagaatttcttgttaagtgagttttatatgtggctgccttcttgggtgatgactacaaaacttctgtatttctgtaaatatgctgatttgctgaatattttttaaaaagtaattctaaacagagcctagcaggcagataacattgtattaagcagaacattttattaagcagattggaagagctcacattaagggatgcctcccttttttaagattcaggtttctttctccctggaatgacatgatcaggttggttttagattttctattataaagcagtacaaggcaggatgatcagatctaaatttatataactatctgaaggaagaatttaaagaaaaaaaattaccatgctctttaatttgtgaagttggctgaagttggttgtgtaaatatttcacaaaatgttttcattttacaattgtatttcctatgcagagccagtagattcttggaaatgaccctttaaaagtgtagctttacatcctggggataatgactttctggctggtttcaaagactgggttgttttgcccttggtgctaagaaagtctttgtaagggaagagaaaatgccgccctctctctgccaggccagccaggggcacagctcacatcccactcacacacatctggagcaaaagggactaagatctgagcctagaaataagcaccatcagtatctctcaactgtgagctgtggggagcgcttcaggcgtgaaccgtgtgaagggaagtctgggctcattctctttcagaaatatttattaaaatcactccaggggaaaaatattttctttctggtatagccctgtgttaaccagtcatagctaaaagctgaaacaaataatattcttatgtttacataagaaattcacaaattttgaatttctaacttctcctcctttttcagccttttctaactttttcctgactgacggagctctaggaatatgagaaaaggctaacccttagaattgacctagatgcttccttagttggtgggctctcagaaactttcagacttgagggagtagtaatacttgtttctctacgtctcatgacaaaaagcaataccttcagacagtgtgtctcattccagaaatatagacaaaaggtagagtcttaaaacactgtgagtgtgggcagtggggagctggtacaaataactatattagaaaagggtttcttcttctcactctcgtaggtctctctcactcccaccttactacttagggtttgttcatattctcaaattcttctagcaaccattaaacaaaagagaggatttaaccaatatttttctattgcataaactttggttgtgtctacattaacagaagagttcagcttactttagcaattatcttctttctttttgtctagatactactcataattgggttgacaacctttttcactgctgctttattaccatagcagtgtcatacagcctgccatcatgtcagctaatgcaagaatttccactgagcagttgtttgttcactgttactgcaacaggttgtaatgagaatgaggcagaccacttggaccgggaccagcagccttatccaccctcgcagaagaccaagcgcatgcgaacctctttcaagcatcaccagctccggaccatgaaatcctactttgccatcaaccacaacccggatgccaaggacctcaagcagcttgcccagaaaacaggtctgaccaaaagagttttgcaggtaagacacatgcatcattgactgtgcatacatttcccttccccttcccagtaaaaatagtgctcttccctggttagagtgacgcagatatttcctatattgcttcttactagtttatcttagctatctccctagagggtgttctgagattttgcaggggcttcctggagggttcccaaacagagacccagggtctttttaaatacagccacattctctctacatatgtggagatgggccctccaaaggcagcacagcttgtctcactgctgtgcaaatgcgagtgatgttatttgcacaggccgtggctttatcgatttccattaatattatgctcagtgcacggacttgagagggacctgttggcactgccttaactcggcaaacttttggcagcctcactcaccttccaaattcaggtggaaccttttttccactcctgaaaagccaaaagtatggttagtgtttcagcaaccaattggagcaagtattttcctgccttaacaaaccataattagaaacaaaatattggaagttagttctgctgtccaattgatttcctaaactcatcatggcaagaacatataactaatgaaattatgataggttgctgtgagtcacctgtgatcttctctcacttcttggtgacaaatagcaggcattttaaattctgctaaacagtttcaggctgttcgaggtctgtggccctgggagttttttctatgtgaagaatatataccgtgtgttgggctcacgaatggcttgaagtctgtttcagtgatgtccatttcatatgagtgattcttactttgccatactttcaatggccctgcttctacctcttctcaaaagataacagttgaggaatcaccgtgtatttccccctttttatcaccatgtgttcatttccatggtatatccacttaagcatcagttgttccaagtggcacttgttaatgctacagggtggaataagtgcagttgagagataataaatctgtagtgttacttgaataactctgttttaaaagaaaagaaaaaaaagcccctttcctcctaagaaagacaaacaatgatatttaaaaggagaaacctatatcaaaaaaaaaaaagaaagaaagaaaaagaaaaaaagaaaaagtgagagagaaagaaaagaaatataaaaatgaacatcggtaaagaaatcaattgggattggtttgcaggtttggttccaaaacgcacgagccaaattcagaaggaaccttttgcggcaggagaatgggggtgttgataaagctgacggcacgtcgcttccggccccgccctcagcagacagcggagctctcactccacccggcactgcgaccactttaacagacctgaccaatcccactatcactgtagtgacatccgtgacctctaacatggacagccacgaatccggaagcccctcacaaactaccttaacaaaccttttctaacattggttttttttttttagtttttaaattcttcctcttctttttattattattctaattattattattttattatttacaagactttttttttcttctaacccacaagatatttggggaataaaaataacagcttggtgtgtagcatctgcagccacttggcaaatgagtttacagtattgtctcctttaagtgaatatattttgtctacaaagtgtatttggatttaaaaaaattaattaggtctttcagttggtaaggagagtttttgaataattctaataagtgcctcttaaaattgtatgttacttatttccagaatctcgaagaaaaaagaaaaaagagtggtattattatgggcaaataatcatattcccacttaaatgattaggttaataaagaaccagataattaattagttactttttaaatcttgcaattgtatgtgtgattatggagttttgaaaacgttacattttttaaatcttaaaactgaaaacttgtttttagtatttctatttcttacctgaactgttaattcaagtgaggaatatgatgaaataaaagcattaactacagacattttaaatagtaatgattaattaggtgagaaatctattacaggaatgtgacttttccttctcttaggggtgtacaactctaaaaactttttacttggttatttgtttttcaacatttgaaaaatacttaagctccctatgtatccatgaaaattccgcattgattttgacattccatacttttaacctcctaaagctaaaaacaatagctcggaaaccattctttctagttactttttttcccagggaaaatggaaataagcaaaatataatgttttaagaagtaaaaaaatcaatataatttaattaatagctctattaattggcttcagctgtaccatgatattgtatctggcattctatatgaataatgtttaaaatacccagcctggtagacttataccaacaattggttttgttttgttttattttattttgacataggttgacttatgtattgaaaataatttttctgatattagagatttgaagttattagtcttaaagtagataaactcagaagccttgtggatgctgatctgaatatatttcctagtttacagtagcatttttttcttttaatttaagctaaaatcttaatggtctgggcagtggtgaatgttcatctattacgcttctgttgtagttaaataccaattagattgtggatttcctaaaaaaataaaaaagaagtcaagatatatgtcttgctttagtggattgttaagaataactttgcacatattttccactttttggaccccttaaatctcctttggtggtcgaagtggctatttaatagattttaaaggtgtccttctggctgtataaatgtgtggttacatattgacagttcactgcccacattaaagtgcattattgtaacttttgctcagggtctttagaaaattagcacagaaagtagcttattttttaaaaaaagatgatggaagataagttaacactgtaacagaagaaaggtgtgattgccattatatatttagcaagtatggttatcatcttatatggagcttaaatcttgacttttcatacttctattacattttgggcatttaccactaaccagaccaaacaaccttggtaaggctgagatcttattaatacacttttacaggtaaaatattgacacttataaattttgttctttgacagaacaatatatggtactatatagatctactttattaagtagactaattataactcagttctcctatgtgccttatgatataacttggaagtaagtttgtgaaaaatcaggatatatgtgttgtttgttaaattaactgttttaagcccttttaacacctcactagttttgtactgttttacctcttatttctgaaactctttttatggtgtatcctgttagaggggacaaacatgtcatagaaagcagttgtgcactctttcaaatatagttgataaattcaataatcttatatattgagcttcgtgtttatagtacagtaagtggtctagcaaaattgtccatgtttctttgtttattgataaatgcattgtatagaaactatttcccctaaatatttatggaccaaacaattgtgatatatcctattaaatttgtgtgaataaaacattttgaatctaaggagttttctttcccatcagttttatttaagttttaaccgtactagtgtgttccagcatctatatgtaaaagcttttcaaatggtaatacaacattgttagaaatatttaaacatacaaatagtttttagacttccaaacttctgattcatatgaaatgttacacattgttgcacaggcagtgtaattcaacctagaaatacctttgaatatatttgcttataacaaaagtaatgccccactgatttgactcagtccaatttttagaataaaaaggctaattagcatataaagtaattgcatggaacgaaaccttaaatatgattaagatttcatgttaggtctattgagcacaaatggatatttgtaaatctaaatagaaattgcagacccctaaaagccaagttgctctgtagttaataaattgtcactatgatttttttcagggagaacaaatcttggggcattacagccaaacatcccgacgtttgaaaattccctaaagtattaaaagaaggggaaaagtttgatcggaaatccactgcagtgaagacaaagacactattaggttatgataatcatacattaaaaaatttattaagccaaaaaaaaagagagagagagagacttaaatgtcatttactgaatgttaacgaaacttgtgttctttatggtgtctaacacaactgaaggcctaaaattatgtggtttaaacaaaattagataaaccatgtacaaaaccagagcaacctggcagtaatatgcccaccccatatttgaaaaaaattattattgaaaaaaatttcacacatttgtcaagcacagttgtaaaataaagtccaaaacattcatttcacctgcttgctaatgtgtattagtcctgttaatggcattttccaactgtaaattcaaagaaaagctatcacccatttaagagtatagggatcaaaccccagtaattttagcattattgtttatcacttcctttttaaacagaaatctctgcatgcacttttacatatgtcacctctagtgtacacctctgtatgatgacttatctttgctgtttcttgtatgataaatagctttcattaataaacatttatttgatgcaaacatagttaactttatgttaaacacatgctgttgaaattaattttgaacacttaaagaggcagcacagtacatttacaacttgttatactaatgaaaaaatacaaacagcatagtgagattaaattctggtaatctaggataaaattacttacttggtttttaccttttcatgacttattttcatttgttgtattcaattgccacatgtattaaaaataaaaaacaaagtgaacccaaattacaacaaaataaaccttagaataaactattgtgtaaaatttcagcaacttttttagattactagggtaaaatttatagatcctatgtgagtttacatgtttgctatgcaatgaacaaatttattgatgtatacaaatatattctgaactataaaaagatccaatctttgcatagttcaattacatatgattattacaaacaaaaaagcaaatggaaagacagacaaatatttaggaatgaggttttttttaattgttaaagggaatatttgaagaataaaattttagctattcctatttagccgtatatccaaagcatatgttaaacaaactaacatatactttccagaaaatttttcattatgatgaaatttttattatatacaaatgaaccctatgtaaatgatgtaacttttatgaatgacagacattaaatatttcacttacatgtattctcagaattttgaatgttttcttaaatgctttcacttcctgaataataaaaagaaaaaattttaaagaagagagagcaacttactaataaaaaaaagcaatgcaccatgacaagtagactattttgagtgatcacaaatcatgctggttttgtcagtaacttgaatgtttatgcctcattgaaacctcatccacagctatagcaacttaaatagattttccaatgcatttccagccagtttattcaaatctttgccctacagtcttgccttctttccctgttctgtcacctgtggcaatttcatttagaagtattttggaacttcgcctggttttacagacctttaaatatttgtctggtatgtgaaatgcaggaagagaccagagagggaaagaacataactgaaattagacatctgaaaaaaaaatacaaatttgaaacaggcacattttttaaaaccaaaaaaaaaaaaaaaaagagagagagagagaaaggagtactaattatgtgagtgggaagaggaagcgtgtgatgcagagctggaaggtctgttgtgctttactgtgatgtaaagcagtctttgagtctgggcaactgcacatttactgtttggtgtggaatagaaaaatgtggacctcttagttgagagcaggacactaaattttcatagcttctacctcccagttgcctgggttagtctaacttctggcagattgatcttgggcaaaaagcttcactgagagttagtgtctgtgtgctttggttgaatagccaccttaatactgacttacatagtgggtaggt

SEQ ID NO: 320 - DNA, 342257 bp, Homo sapiens
  source 1..342257: mol_type = genomic DNA
cccgcaggcgggacctggcctgcctctcccatgctatcattcccgcctggtgctctccacaccagctccagtcttgctggcccgctgtgggctcctccacggggaagctcattcctaccttaaggccttggcatccatctggaattcttcccccaaattgttacacagttaaatctccctcactcatgtcacctcttcaggacatttccttacagacaccttccttgatcgtcacttgggctgtagtgcaaaacagaaggcatgctcaagtgggagtggccaaggagagtttaaaggaagggttagaaagaagtgagccggatcgggagaccattatgggatggggaagcctttaccatacctaggcctgggaggttgagtgggacaagaggagatgaggaaccttctggaaaccccctaaccacctgcaggaagggacgagataaataaatgcacgtctctcttcagctcactgaccatctgcctacctcccgttaatggaaccgcgactcacaggtcagcctcccagccaaaaggggggaaggctatcggaaattaccccgcgctttttctttccatgtcattatcttctcctcttttatcttaacaacacccgccacaattatcttcttttgatttacatgtttattgtctgtcccggcccccaattccctctacaatgtagatacctcgagggcaaggacttccaggtagggtgtgtgtgggtagggtgtgtagggtgtgtgtgtgtgtgtgtgtgtgtgtgtgtgtttccatctctgcgtccccagcgcctggcccagtgcctgacgcatagtaggtgcacagtgactgttggttgactgcatcgacagactaggacacaggtagccttcctggagaagaaaagctcatcagggtcgtttttctttttcttcttacaaaaagatcaggtggctgtgtacttcccggcgccgggccaggggctgccccgccttgcccctacctctgcggccaggaaggactgcaggtgctgcgcggccagtgcccgcgcgtcctactgctccggtgccgcagcgcccgctcccccgggcccgggtgcgccccactgggcgcgcgtctcccatatgatgccagacccatccgcccgcccctcagcagccggcggggcgcagggacgtgcggggcggccagcggattccctctatcgggccgggtgtgaacgggagggagacacgcagcgctcgctccgggttatttttagtccgtagctgtgctccccctccccgggggcggagcggccctcgaaggtggggaggagaagaagctcccggcgcctccgcgctcgctcccgcgggtcactcacggcgcgttggagcccgggcggcgccgggaacagctgccgcggcgtcctctagcagcgcgcggctctcccgggacctgcgccggccgggggcggggagaggcggggaggggaggccggcgggcgggaaggggcggggagcgcgctcctgcggcggcgacggcggcggccgtcctcatcccggcgcttgagaggacgcggggctgcgcaaatggcttgtcccgctctcggtctggaagctcttcagcccctgcagcccgagccgccccccgagcccgccttctccgaggcgcagaagtggattgaggtaggtgcgggtggctggcgggcggccttgcactggcgccctgagccacggacccgcgcacgctccgaccgcaggtccagccttgcctccccccaaccgcccccactttcttttgccagctgctccaggtcacccccccgggcctcggcgagccgcgaaaccttagcgctttggcattggaatcccgggcgagggtgggcgtgaaaggggacactgcagtctagctgcgcgcgtgagggcaggaagggatcccctgcgcgtccatccttcctgcccgctggcctcgcaaatctcagctagcgccgcttccaggcgctgccaagggaagcgcagtgctagcaaagcgttgcaaaggcgcaggaagcgcgagcccccagagacttcaccggtgctcgcatttcggggtatcttgcttctggtcccacatttcgccccttgtccccctaccccgcacccttccggagcagagttggcagtgtcttcacggaggcgcatacccaccggagcctcttgctgtattcctggcaccgggtcaggtgtgaggctggcacagtgcgcagggcgggggtagcttgcaagacccacctgcgagcacgcatccgcatagacgctgcccagcctttggcaacccccgcccctctccatcccaaggactgcagggtcggttccgaagtacgggctacccggtctggttggcatatttcacttcttaaataactcgttggcaggccagggaaatcactggagctctcggctctcagtcccggaagcgctcactgggtgatcctgattcacgatgtctatcagtagatgcagcttggtagccccgagctcccgaaatgaactgtctgcggggttcaggacgcttgaagggcatgaaggggaaaggtgaccccctatgattagtgcaaggagcctcagcttcaatgggtggcctttctggaggcttagtggaaggtatgaatttggccttgtttccctcagtgacaagcagccctctttgcctggtagttcagaggaggaagtgtatcgctaaatcatgacccagcaatgttgaagcttccagaattccgcctgtcacttagtgactccccactccgttcagcattgtggttcccaagaagctgctagagtaacaagagctccacgtacagatttaaacctgctgagcttcctgcagaaaccaccctcacttaatgctgctctcctgctccagccagagacctgtaccctacagggttaacctgcttcccgcaagcaagagtgctacttgagtatagaaacatctgtttgaaaatagggttcaagaaacagaacaatgaacatcagggctgtcttgctgaaagccccaggcatgtctcataatttgataactcaccatcagatgagaaaaagaccttggctttttatttttgatatgtggctggaacggtttggcgtgtgacaggtgctctgcctgtgttgcgtacttatgctcccaggatacacaggaagcatttgtagttactggcttattgcagagttggataactatttttcaggttcttgaactctaaaattctcaggagagacttcgagtgtgggtgggggtaaggggaggatctagaagcagaacagtctttactattcttgaaggcaagtgatttattctcaatttccttaactgtatcattgacatattctgctttaaaaatgtattgtggtatgagttacacatgtaaaagtgcacaaatctgaagtgtacacctccatgaattttgacatatgtatattactatagcccccacctaaatcaagatacaaaatgtctcctttggcccagattacagtttgcttttaagtggtagtatatttcaggctattatgcagtgcagaatattagctttaatatcacgtttaagaaaaggaagaagggattccttaagacagtagaacctcattaagccctatagacagtttgggattgttcttgatgctttaccattcataccaatttaagaatgtgaaaaccgtaatggggcatgcgtggctttaggaccaggcagcccaggcgagctgcgtgtgcattattgaagtggcctatctcctttcaattgttgggttcagtttcagggaaaggagagcttccccctcccaggctatataaaaaggtaattgctccaggggaaagatagagacctcccccttccttcccagaggttcttcttgaaatgtaaatgccgagtctgcaaaccacgggaacccagaagttgtaacagatggttttgcatgcagttgccttgtgaacaaagattcctcagctaatacagcaataatgtagtacttaggggcagtgaatccccgggtgggggggcggattggggattggtatctcgagacaattgcaactcctctaggggccccattgtctctggcagcatcctcattggtagggctttgtttttacttttattcagttggtgattaaatttcccataggttttttttctttctttcttctttttgagtagtcaggaatttcaccctttcataaaaatgttcccttgggtggagcaagttaataaacaaactttgctgcttgtctcgcctcgattcttggtcttccttgagtcatggattggcaagaaaacattcattcttaataaaggctcagggaaccagatccaggacgtaacttgttagtgaggaatttctcggcgtgcagccttggctatttgaggaccgtgttactgggcaggaaatgtggcctgggaacgattcccccacttcagcccccttcccctcactccttccttagttggcaaaggtgaaagctctaacggagcactagatggtcacagaccacgtggggacagccctttaacactcctagtgactttttatagctgtaggaacaggttgcacatctaactgtgtttgggaagactcctagaggagacagcaaacttgaagtagtaactgtggctaccagcaggcaggggagtgactaacttctttccatactacttttctagaaggccttactaagcagaacacagtaggtgagaggtcagaccttggagctgggcatcctaggtttgagtccagagtctgttactttgtagctggatgaccctgagcaagctacttttcctttactgtggttccaaatgatttctttggaagatagctctagttgttagcaacaacaaaaatgactaagagttattattgagagcatctgtaaaacaggatactaataacagctcacctatttcataggagtgctgtcaggattaaatcaattaatatatttaaaatgcttagaacagtgcccagtacataggaagtgctgtgtaagtatggttagtagtattattaccattattattaccactgctgttacttttactactactattatcattatgataattattactactactgctattgctattgtttttttctgttgttaataacaactaaggttgattttgaaagaaatgattcagaacaccagatttcccgggtagaaaatatgattcaattgcctactgatttcatcctattatctcactctgttaactctggatacctggagtcgaagttaactagatgctacatgtcactctaatttgcactaaaagtgacttggggatcagagaaaaacctttaatatctactcataaagtgatcttggtagtccatcaaagcttagaaaattattcttcaatattatgctgaatatgtaagtttaatgtataatctttgttaccaaactccaagcagaatgctcaatgcctctcctcttgttcttgtagatgatctaatattaaatcattatacaaataatgggtccaaatattcatctaaatgcagcagaattttattcactgaggttgtgtcaactcctgctaggaataagaagaattcttccattgattttctttccctcttcctcccttttattatttccttctttttttttggtggtatttattgagttacaagagtttattagtaggttagatgactctgattttcctgattccccgcttctcttggcctcaccacccacaacaatatttatctgttctaatctgtggttcttcttttcagtgccaaacactttctgaagaaacagatgtccttcgacttggtttcggttatgatttggaacaggttcccaggcctttagggagggactggaaatttcaacccaactcagccttatttctcaacttgagaagttcctggactcctttaccttcaatcagagtgtgcccatggggcttggtgatgaatacaatcttatttgtgacctaatccatacttcacaagagtgagaactagtgctggaagggatcagtttctcattttggttcattccctgctgcccacatagaattgttttcttattcagctgggacctaattctgaagattaaaaacactgagggtatcatagctctccaagaccaaaagatgcttgtgttgtttggcagtagggaaaatttatgaatagcttttgagataatttagcatttaatggccagtaacatatgacttttgtgatgtaataccataagttatacatgtagtcattctaattctccacctctgtagggactagattcttaacatctttttatcccaacaggtagttaactttgcagatggtcctccagctttgcataagttgccaaggaagaggaagaaaaaacttttctggctagatcaaggaaggagtagtggtctgaatagatatgtaaatgagagcaggcggcatctttctcacaatgacatttaaatagtctagcttgtttgtatacaagagcagctatgacacaatgctgtcacatggtaggaaaacagtgaggtcccacagatttggggaaaggggatgcggaatgggaggtggagctggcacttcttgccccggcatctccctggaaaccagttgcatcaggcgagctccaaagggcagactgagcactggctaccaagaaagggaaggctgagcatgtgttctcagccactgggtctcttggcctccagctctctgctgatggatgacaatagagccatgatgtagacagttggccttgattctgtgagtggcagtcagtgctaggtgggactaggcagctctaggagtactagaaattggcctggcagcttctctttttgctttagaccattctgaagcttaaaagcatcatagttgggggataacatgatgataaaaattatgttaatgatgctgatgttgctgatgataaaaggtactatttattgggtgcttattatgtgcctgctaaagtctatgtacagttggcccctcgaagtggcgcaaaatacattttgtattttgtattttggccttgattttcatgattcaggacagaatcagttaacactggttgatttttgaccaaactgttcttactggaattaggttttccttttaagcccagttcactgttctgagattttttaaaaagtacaatacaattttataatagaacacctcatatgttccttaggatgtgtgtgtgtttacatctgaggcagaagaaaggtatcagatatgatcttttttggaggaagggtagggtagataaaaggatgacttcagtgctattaaatcaggaaaggaagggataatagaactttggttttaagtgattgagaaatataaaaatagcctaaactagagggctaaagataatataggggaaaaatagttcttaaaaaaatgatagaatattggaaagacttctgtctggacataagatgttatatttcaaggaggaatgatgccgtggaattcagttctgctgtgataaaattccatgtttgcaatattgaaaacaacacttccaaagagatgcccatgcatctaaccctgatgggatgtgtattagttcatttacatactgccataaagatacgacctgagactgggtaatttataaagaaaggaggtttaactgacttacagttccacgtggctggggaggcctcaagaaacttataattatgatggaaggcaaaggggaagcaagacaggtctcatatggtggcaggagagagagagcaagcgaagagggaactgccaaatgcttttaaaaccattagctctcatgagaactcactcaccatcatgagaacagcatggggtaaccgcccccgtgatccagtcatctccctgcaggctccctgtcctgacatgtggggattacaacttgagatgagatttgggtggggacacagagccaaaccatatcaggatggctagtgtatctcagggaattacctttggcatcaggaaaaggacagatgatatagtcatataaaatgcacctaagaaataacttggctgataccttttcccactgtcagcaaaactgtgctctatgctgagaccttaagaataaaatattggttaggttgggaaagctccatgtttccactgtcctgcattttgcctgtgagagttactctagtgtggctgttggaggctgcagcttggcctcctggtcagtgtaagttagggactgccccacccattcacccctagatagcccattaggaggccatggaggaatacacctgcacttgcttttaaaatcaaggtcggctaggtgcggtggctcacgcctgtaatcccagcactatgggaggccaaggctggtggatcatgaggtttggagatccagaccattctggctaacacagtgaaaccctgtctctactaaaaatccaaaaaaaaaaaaaaaaaaaaaaggaaagaaaaatcatccgggcgtggtggcaggcacctgtagtcccagctactcggaacgctgaaacaggagaatggtgtgaacctgggaggcggaacttgcagtgagccaaaatcgcgccactgcactccagcctgggcggcagtgcgagactccatcataaaaaaaaaaaaaaaaaaaagaaatcaaggtcaagaacagaaggacttgtagctttttcatttccatgactgaaaactgttaaaaaaaattcctcagccttatttttttgccaagtatgttcaccaaatgggtctgcaccaagtgaggaactgaagttatatttattgcaatgagtacatagctatctttttctcccctcagaagtgtttaaaaaatattttgaacaattattttattttaattgaatatcttattccaattgaaatggaatgaaagcgacaataagctcagtcaaattgttaaaatatgaaaataattatttgggagacttggctatcactcatttgtaagtttgcttcagtataaacagtggcaaaaataagcattaatattttaatgtgtgaaagtgtgctttcaaaaattatttcctgaaaagtgtttactgagctccaacaatgtgcagcatagtgttaggcatggtgttaggtaatgaacaaaataaacatacttcctgccctcatgaaatatacaatgtggcagggggacagagagattaaacaatacatatataattacgatttggaatacatactatgaagacaaagaatggggcaggggggattaagagaaaagcactctttaaaaagacaaggattcttagtgaaaataagatttaagctaagaccacggaagaattctaagcaggagaatttgattgatgatgatttattgagaaaagggcttgcgttggatgctacacatacttttattatgattgtgttttgaaacaaggtagggtagaaacactcttaaatttctctaggtctattgaaggtagatatgtgttggtggtagggcagggggtgaaggtacctgcctcggaagttcttgaatattccttgcaggccactcagagtttgcatgatgatccactgtccattttacatctgaggcacagataagaactcttctaagaaaaatgcggagaggactttgggatttgtgtttgagcctagactctggattaaaattcttggacaaaatagaggctgtagaggctgtactccactcttagcaggaaggggctgcgggaaacctgcttgcttttcagtgagggaagagagccattttgtgtgagacttagggtggtgacccacagatgtcttctcatttgggaacttttcccaaattcttccaaaagagggggctttataaactactaaagccaggtgccctttgggatcctcataaattgtaaaccctggaggtccttgactgagattcctttcaacacttgaactaccattcttagaccccctcccccatcttcccagtctaacatggctgctggagagtcgtgatcacatcacctttccaggaagctggatggaggcaaggaaagtgaagagtgcatccttcccatataaggtggcttctgggaaaccctttctgacatactggctactattttattgcccagaacttcaggaacatggccctttctgtatataggagagactctggagaaggatcttttaccccaggcaggagtaatgctcagataatattcttgagttgtattcctcaggaaaaaggggagaatggctattggggtagccacaacctggaatgccccttctccacttctccagggacaaatcctttcaagatagagcttaaacccgactgcctctgcagcatggtccctgattcctctaagctcattaatccttcccttctttgtacacacctgagcctcagtttttgccttttttttagaaaagttgctgtattttactatcacgaattttttttgtgtgtgtgtgtggtggggggatttgcctcctttggtgaaccccagagccctgtggccaaggactgcgtcttagtcatcaccctgttccctccttgtttcagccaggctgttcctcactagggcctcacagccacatttccccactgcctgagcgctttctcagtgagtctgtgcccagctacggttgcctgattggcacttggacttggctgtggcagagaaaatagactctgttgctgccctgacaggaagcaaagtgtgtgtgtgtgtgtgtgttttgtagtgattaaaaaaagcagtttacccaatagttgcctggagacagtcagtgattggacactcggagggtgatttctctgttggcccttgggtgaagatattctttagggtgctaaccctcccctcaagttagactgggtcagggctcgttggagttcctggctgcaaggcgggagagcagacatctcttttctttaaataaacatgcccccagcattcggccttagggctctcaccttctctttctttccctaagtcaaagcaaacctctctttcacctgttatagaagtctagctaattcccacttcttaggatgagggaaagatagagcacttccaatgatagtgaatctaaaaagaaatggaagaatttttattatagtggtcacctgtatgagttcttattagacaggtatttttaaaggaaaaaaacccaaaataactgactagtagctggtatccatggtatcaataaatggccacggctgtgactgttaattgtcatgacccaatgggagcactgagaaatagcatcccctcttcttttcctatggaaaattaaaaaaaaagttgcctgtggagctgaatgttgtcatcagccaacagatgaggttgccacctttttccctaagggaccatgcaagatgtcataaataggaggggccagtgacaagtagaagcctgattcattatgctgttagagttgacagagtgtgataatagtgataaaaatggctagttcagtgccaaataaaaataacagcaaacacacttctggaacacttaccatgtacaagcggtagtctaggagcttgcttgagtggtagtgtaggtgcttgcatgaggtggtatattgtgtatagaacaaacacccagcacagtgcctgatatataagatacttctcaagcaagcactgtttatggccgttttacagatgggaaaatggaagcacggaaatggtaagtgatatgcttgaagccacacagataatcagtggcagagctgggatttgaacccaggcaaactggttccagagcttggactggtgactgctgtgtcccgctgccttatccttaacagctgctccgtatatatttacttattggaaaaagtacctttgcagagttagtatttgggaccctttagaagtaaaagcgaaacttctaaaaagatcatggtcccaagtaactacctaaccaagcaggtgacctgcctctctccttctctctcttcattcccttaatggttcaatatgctgtttattgagcatcttctatatacatagcaccgttagttgcgaggaaacaatttcatccatatggctcccaagcacattctctgaaactggaaccctttcaatatgttttaaaagataattgtcagtagggtggttaggaccatgatgaaaaatcattacaggagcccaatgaaccatcatcagtgggtggaaccatttttactccctttcacttcacgtctatttccccagtctttttctccttgattggaacctgactcccccactggattcaaatagtccttgatgctgagatccagactggaatgattataaacaaggggaaggaaaatgtggatttagggtgcctccctgccaggcaccgttagttctttgcgtatggtattctgtttagtctttgtgtaacacaggtatctgctgcccccgtcccagtttgaagttctctactgtgcctgtttcaataaatttcacccatgttaagactggcaggcctgatcccacgtagctcctgagtccccacatagtgcccacatgatagttcttcttttggcctcatctggcacctcccaacagcagctccactcttagacctctcatgtggcacaggctctggcattctgaacaaatatagttggctattttataatgtcggtttctgtaatgaggattattacatatgcgattgggaaataagagaagcatgcttggtaaggtgcaagttgcgatggttcatgtgagatttttattaacacttgcgtattttgtaccaccaaatagcagtagttgaaaacaaaataggatagtagaggtgaacacaaccagccagggaggtgaacacccctctttttgctctagactccatttggctttgtgttgattgaaacgtctgcttttcccagatctttctgcattttcctctcatctccataatgcagcagtctcggtctttcctcacacccttccaccatgcgctcttgccccccacctttttgtgtaatcttccgtttgttctgtaataggaaatagaaaacatctttttatgtgtgctggtaatttttagtgttcttgtttttgttactgctctggttacaaagttgagtagggtttgggccttttacatgaactctgtattttccacaagccctgttatttttagtgtgagattttgtaggatacaaggtttttggctggctgtcttagtttgggacattattcatacatttacaggaatatggatactgttttatggtagaaatacatagatattaatagtttgggcagatagtatctctcacacacttacccacacagatgcatacataaaacaataccttgaagattcccagtgctggagcctgggatcttgggtcatatggaaaatgttttctttaggaatttcacatttcctatctgctatcagaagaccttggacaacatttccaggagaagcttctgttgcctttggaggaggtagttgaatattgtctgtgtgtgtgtttttctgatccatttttctttgagattttgtgcctgggtactacataaagcagcactgttttcatccaggaaacctacaggagttacttattgtgagtgagaagcttaagtgagttggaaatgaggaaactgagacttgagggttggcaatttgtctgagggtcagtgacttcttggctgcgattattcctgttctctggagccctttctacaccagtatatgagtattggcaatttgtctccgtttgggacatcattcattcattcatcatatagttattgagcgtgtcctagggactcagtagtatgagagacaaatgtgagatttccattccacctggaaggatggacgctgagcacagaatcacgcgtgtgatgcatgcttggaaagggaagagcaagttggtctggaacacaaaaagggccgggatctcctttggtctaaggggcaatgggacagcctctctgaggaagtgctatgtaagctgagaccccaaggatgagcaggggttggccatgcaaaaatgagcaagaaatcatgttctaggcaaacacttcaggctgtagtgtttgccttaatggaagagctgaagaagaccagtaaggcaggagctttgggagtaggtatgagggaggtgcaggatgaagctagagtgggctgcaggaaagctgcatggtcctggcaccgaagataggaatcctccgtgcttcttggcccggcctgggccatggctggccttgtctgggaggacagcagttggattttctccaaactctctcaaattactatagttcctgacaaaagaatagaaacatagctaacatttatgagagcttatggcctggcaaattctgtcctaagcacctgacttttcaaccatcctatgagctagctacaaactcttattactcccattaaacctagaaatgagtgaatggctaagggttttacggtcattaggtggtagagctgatcttcaaactcatgcagtctggctgctttacctgtgctcctaaccaccatgctatggggtgtgatatggtttggatttatgtccctgcccaaatctcatgttgaattgtaatccccaatgttggaggaggggcctggtgggaggtgactggatcatgggggcaaatttcccccttgctgttcttgagatagtgagggagctctcacgggatctggttgtttaaaagtgtgtagtacctccccctgctctctcttcctcctgttcctaccatgcaggacatgcctacttccccttctgccatgattgtaagtttcctgagtctccccagccatgcttcctgtagagcctgcaggactgtaagccaattaaaccttttttctttataaattacccagcctcaggtagttctatatagcagtgtgagaacagactaatacagggtgcaaatgcaggctgttgaccaagggtgtctgtgagggatattgatgagggggaacagcagtaaagagctgggggcaggagggtagaggtaggggatgcctaaggatgctggaggccagtgttggctttagacatgttttctgtattttaaaagaaactccaaaaataagtcctctcaccttgacagttttgccacctgggaaggagagtgattgtatagaaagagtgctccaggcatctcccaaaccccacattctaatgcatggggactctggttcccaagcagcctgatgaaccctggtattgctctgacatgataggccactcatttttaacttccatcaagagttgtaagtagtatgatatatttaaaaatgtatttcttattttattttaaactctgtgtgtgtgtttaataatttttttcattcaatttttttttttgttttagttagcattcttatggttgcaagcaacagaaatccaaccaaaactggctctaaaaaatagacagttgattgctcattgacgttctggaggtagatccctacttcatacaaaggctgactcagcagctcaatgatatcagtaaggatctggattctctctctctttccaccgtgctgtgcattgtgtggctttatgctctggctttacatagggcctccacacctgccctaccccacttcagaaggtccaggcttttccactaaaggctggctgggaaagagcgactccagtcctcaagttctctttacaccctctgggcagagaaagaggacacattctcattcatgatcaccagggaaatagatgagttgattagcctaagccaatcagacttcaccctggtccgtccctatcaaagatgctggctgctacccaacagagaagcagtgaattccctagaggaaaatctgggtacttttagtagaagaatgggtaaagtggatgccaaagaggctaccaccaattgttactaacattttattaaaaatgtggtaatatacaagaacacacagatgataagggaaggaaggaaataattaaaatgaactattcagaacactgactacttcttggaggtgagtataagattataagctgggagtggttaaaaagaggcattaatagattgttttactcctatttttataagactagaacagtgctatttttagaggtatcactgaatgtcaagtgcccaacccatacctaatgggttctattaggtgtaaaaatgtgattgaatgaactggattgatttttaaactgttgattaaaaaaataaagatgttcatcctgggtacttcaactctcctttcttcccaatatatataaacctttacactgaattactgtaactttaaaaaaatgttataaattaaagtatccaataccagtatctgatttttttcccatttaatttcatatttctcaggtaaagatatctattttttggagcctgaagcctagaaatagcaaaaccatgcagttgctgttcaccggacactccgggtccagggggtgtgcagctctgtgcctgagcagtccccaggcatgtggggcttttctaaaagtggatacagcggctgtcgcccactgatcctctgtgctgagtgacccagattggcacagcgcagctgggtcctacccagggcgagtacgggaaagaggagtaaaaataaaaactggttgggcagcttaggtggagtcaggatacttgaaagctcacaggttactttgctaattcttgggcagatttttccttttttcttttttgaggggatagtgatgattccaatgacagttttctagatttcttggatttgacaaaatagtttcatacagaacagcaaaatgaagtatgtagaaaatatgttttttgagattagaacatttgcccttgacatgagtttcttatttatcctattcaacattcaagtctccaataaagttttccccaaaggtatctcttttatggagttactttctgaatgaagacatttctgtcttttttgttaatagaacgaaatgtacttgccattatagtttctatatagttttctatgttatctaagaaaaatgagtaagagtgtttaggtatggtgtcaagttacccacccagaatagttgttcaatctctgccactgtttggcattttgacatttgtgtttttaaagtgtagtagatttgctaatttttgaagctttggtccttactattagaaattttgaggttttatttttggtgtttgaccaagggatttttttaaaatgcaaaagcagattttatgtaatgttttcctcagttatggatagctttgataaactatatgaaattttttccctcctgaatgctttgtggcttttactgtaataatctttctgtgatctgtagaccaataattaaatctccaaatggcctttaccttgcaatagcaattgaaaataatattaaatatttatacttaaaatatatgggaaatgtggatataacttcttttaaagataaaatgtccttaaaataccctagtagtaggaataccctagggtaagacatatttctgggaaaaagaattttctgcaatgtttacctcatgacactaatttggaactagagttcttctaagaaatttcttacgttttcgttcattaagttatttatttataaaatctattaagagactgctaatagctatgggtttccttttggggtgatggaaatgttctggaattggatagtggtgatggttgcccatatgcagtacttagtgaaaaactaaaatttttttaattataaaagggtgaatttgatggtatctgagttatatcttaacaaaaaatctgctacgagctcttaatgttttaagcatgattttgagctcccaaggtatgtaaacaagcacatgaaattaagactttcagatgtatgtacaatattgcagcataacaaaccacccccaaacccagtggcagatggcaatggtatattttatttttcttgctcacgggttgaagggtcagcttgagcagctctgcttcaagctgtggattggctgcacttggctcaaggctgtgggttacgttcaagtctgtttcatgtgtctcctttcttcttggaccacagactacctgggagatgctctctttatggcaaatgaatgacaggtgcaccagaacccagccaaaaccatgcaacaaatggttttaaagtctccacttgcatcacatctactcacattccactgcaaaaacaagtgatatggccaagtccaaagtcagtggggcaggaaagggcattctgctcacagtgcgaggggagaggagtggatatttttccagtaatactctcatctaccgcaaagtctgttcaggtttccttggtgctgcaaaggaagatgtgaacattctccctgggtattggaatgtttgagagatgggcattgggttccttggtgccttggtttgttttctgttgctataactaaataccacaggctgggtaatgtacaaagaaaataaatttatttgttacaattctggagactgggaagtccaaggttaaggggctgcatatagtgaggggcgttcttgctagtggagacgctgcagaatcccaagatgttgcggggcatcacatggcaagaagggctcactagagacggccaaactggttttggtaagagacccactcttgtgataactgacccactcccttggtaacccattaatccattaattcatgaatgaattaatccaatcatgagggcagaatgctcatgaccaaatcacctcccaaaggttctatttttcaacactgctgcactggggaccaagttttcaacacatgaattctggggtacacacttaagtcatagcacttgggttgagtcttgaaaaattagcaagcattgtcagttggatggggcagtaagggtgaggagaggtgacagcaatggctagacctcgaagggaacatgagcagaggcatggaggtgtgtggtagcagagtgcacttgggaagcagcagagctgggacatagcacatggagagtgctgctggaagaagacacactgggtcacatcagcagaggccttgtgtgccatgcctgagggtttggtgttggaactaaatgggctgggctcagagtcagcctgaatcgcaaacttggctctgccatttactaatgctatgactgtgggggaagttatttggcctctctgtgctttacctcttaatctgtgaaatggtgagggtatttttagcacctaccttgtgaattgtgattaggattaaataaattaatatactcagtgcttgatataaagtcaagtgctcaataagttttggctgctgttagtattttttaatggagtttagattttatctgtaagcaatggggtatgacttaaaagtaagaaagggatgtgattatattttggcaagaagacattggtggtagtgtaggggatgattacgatggccagcatggaagcagggaggccatagggttgttgcaataatagaggtaagaggtgatgatggcaacatcagtgggaatgaatgtgagagatgttaaaggtgtaaaaatgatgagacttagtgactgagtggatgtgtgaggtgagagaaacagagaaatccagggaaaggaggaacaaaagattgtagtaggatttgttttgttctgtatttaaggatgggagagacttggacatattagaaggccttgacgaaggggtagagagggagccatttattatataacaatgagaaggaatgatggataaaacaagttcctgagacattcagagagggagttgagagtaggtgtaaatagtagaagggacactttagatacttgtcaagaaaactgttaaaagttttttgatggtgatttagttattggtgcataatagattagcccaaaacacagtagcttaaaccaacaagtatttattattttatagtttctatgagtcagaaatttgggaatgattagttagatggttctggctcgggtttttcttgaggttgcaaacaagatgttggctgggcaggtgtcatctgaaggcttgactgtggctggaagatctgcttctaagatggctccctcatgtgcctgtatgcaggaggcctcagtactttgctggctgttggcaggaggtattagttcctgtcatctaggcctccctgtggggctgcttgtgtgtccttataacatggcagctgacttcccctaaagtgaatgattcaggagagcaaaaaggaaggcatggtaggacctggcttcagacttcacatgtcaccatatctgccaacttatctgccactgtatcagccaccataacttcctaagaagttagtcattaagtacagcccacacccaagaggagaggaattagactccaccttttgaaaggaggagtatcaaagaatctgtggacatattttaaagccatcataagtggctacacgatcaatatgtaattttaactgtaactggtcatttatcatgttttatatataagggattcaatattagatattctgatactaagtcatttgtctagtccagtctatttagataaatgatgacggtaagatattctctctagatatattttccaaaataggtctagtattttatttatttatttatttttatttttatttttttgagacagagtctcgctgtgttgcccaggctggggtgcagtgacgcgatctcagctcactgcaacctccatctcctgggttcaggcagttctcctgcctcagccccctgagtagctgggattacaggtgtgcactaccacacctggctaattttgtatttttagtagagatggggttttgccatgttggccaggctggtctcaaactccctgacgttaacctcaggtgatccacccgttttggcctcccaaagtgctaggattacaggtgtgagccaccatgcccagccaggtctagtattttaaacaccaccactaccaccaccaccaaacaatataggaataaaaatgcttccactctgaaatcccacctgatataggtaatcactggtaatatgcactatttatattgaaactcatgttactgaaagttttgattagttctggaaacttttatttaaacaaaatcttacagagatttgatatcttcttttcttttctttcttctttcttgtagagatggtatctcactttgttgcctaggctggccttgatctcctcctggcctcaagcaatcctgccctggcctcccaaagtgctgggattacaagcatgagccactgcacccagcctgagatttgatttgatattttcttttctttctttttttttttttagataagcatgtaataataattactgcctccctgctagtggagagctctggctcagcagttctcaactctggctacacattagaattatttgggagcttttgatttaaaatgatctggatcagggcctgagcattgttattttatagacattttcccccaagtgattgcaatgtgcagccagggtggagaacacagcagatgacaaaataagtgagtaagttgcactgggcgatattggcagatctaagatttaaaacttgtttgaatgattatttatgtgggggtgtgtgaagagatgtgcatccagggaatacagttatattctgtctgccaacaacatcattcctagttcacatgatggaataaaataatcagtattttatggcatactataaagagtagtagaatgttctagatacctgagcagatttgaccacagcttctttaggagaatcttcttattttctgcactgaatcataggcattcctgagtgtaaagtcatatcacaatcagttattctttgtacaaatgtcctaatttattcatttattcaataaacagatcttgaacacttactgtgtgccaggtaggtgcatttaatatccaagccactgaatgccaggcactgaatgcccaaggaagaacttaaccttattcttaaactaatatcttaatatagattctagcaccaagtgagtgattctcagtcccatagaggagacaaacaggtgcacaaaagtggaggccaaggtaactaaatttaaataactgtacagcacagcaccaaccaatcagagcagacccagtgacagtagtgcctgccatggtgaataccggctgtctgtcagctccaagtatcggtaatacgaagtgcagtattttaaacacccaaagaggaatgtaaacaagagggagcagagagaagggaaccacttttataattccaaattcatgtttccctcacagagggagctgaattggtgtggttggctataccagttttccatcctgtcctgtgtacataccccttgccaagtgactgccgttcttctccctgaagaggtggagtctgtttcctgactccttggattcgggcaggccctctgacttgctttggccagtagaatgcagcagaagtgatgaggtgcctgttccaagcttaggctgtaagacaccttgggtaattctgcttgttctttctcctctgtcatcgctgtgacaagatgccccagatggcctgctggaggatgagagacctggacaaagccaaattgccccacttgccccagacaaggctatcctagatcagctaatagccagccagcacctacagtgaagtttctcagcagaagcactttgacattaggggttggatcattgtgttttggggagctgttcattttaggatggttagcatcatccctggcctgtactcaccggatcccagtagtacccccactgccaaaggtgtgacaaccaaaaatgtctccagacattgccagatgcccccaaggggcaaaacatcctctgattgagaacttgtgctccagacttatgagtgcgtccagctaagatcagcagtgctacctagtttctgaccgcagatacatgagcagtaaatgcctagtgttgtttaccactgaagtgtgtggatatttgtctcatagcattgttgtggaataggtagctaatacagtgatcaaaaacatggaaacatggaagtgggagatggaactggacaattggaagtagtccagttgggtgggaacttgacaagtagatttgtaggtagagttgggttagtgtgaagtacagacgaggctagaaagctagggtaggctgtatccgtggagaatttaggtgccttggtatgaactggggacacggttattcatgggcgggggagggaggggtgctgtcagaggttttagttatgtatttatagccaaggaaacagggctatgagtttgtactgtaggcagcagtagggagggggaattggaagcaggagggagggctctgcagtagttcagttgatgcatacataaggcctgaattagggaattaggagagtgatcataggtgtggaaaggaggggagggcttccaggcacatttggtgtaaaatggatacaacttggtaacctgtacattgctacctttgcacatttggtttcccctgtctcaaaggctccctcttctcgagtgttgctctactcaaccatcaatactcagctcaacactcagggaagtctttttggtagtcttccacgtctcgtgaaggcagagcttatatggctgtcaccattgtttttttgatacagagtcttgctaccatcacccaggctggagtgcagtggcacaatcttggctcactgcagcctcgacctcctgggccaagcaatcctcccacctcagccacccaagtagctgggactacaggtgcatgccagcacacctggctatcttttggtattttttaagaggtgaggtcttgccacattggccaggctggtcttgagctcctgggctcaatcgattcacctgcttcagcctcccaaagtgttgggattacagacgtgagccactgtgcccagccatgctaatctttttatcattgaattgtccatcttatatttgaactaataatcagttgtaagtctgtctcttccatattattagctgctaattcacttagtaagcaccctttctatgtttggtctggaggtaggtgcttgggacacactggtgagttagagagatatataattgctgatttcttgaagcatgtggtctagtggggagacacacagataaacaggcaattactgtacatgctgtaatgggggaagtaaagaacggtttaggaacatataggacagacagcctggaatgtgtgggtgccagtgaagacctcatgaggagcgaagtgatgaaggggttggatgtggtgtgggaggagttaaagccagggatctgtgggctttgtggctctggattaagagaaaactgcacatctgaggaaaagaagaaaattcaacatcattttaaagggtcttgtaaactatgatcagagctgtgttgggaaaaatctttgattgattttcaatcctggctgcacaacagaaccattgtatggcgcttttaatagtagagggaactgggccccactccaagcttgtttaattactatgaccagagtgtgtggctcagatatatatctatatctatagatctatctatatatatgtctatatgtatgtgtatgtatatatttaaggctccataggtgattctggtgtgtgaccagggttgagagctgtagggctctctctgtgaacactgtgaagaatgacatttaagggatgaatagaaagaggaacctgcagagaaactgagatagggaagtgagaaacgtggacaattaagtgggagaactcctagttgttaaatgttgaagacaactaatagtatcagcagctaaggcaagaggaattttcaagaaggaagggaggaacacaattgtcaaatgctgccaggaaggcaaataatgaactgaaaagtgactgctgaatatggctaaaaaggttgttagagatctaggctggagcatttcagtagaatggtggggcagaagccagactgcagggggctgagcagtgagtgggaggtgagagggattagacagtgaggggtccttcacattacatcctgctttcttttttttttttgagacggagtcttgctctgtcacccaggctggagtgcagtggtgcgatctcggctcactacaagctccgtctcctgggttgacgccattctcctgcctcagcctccctagtaactgggactacaggtgcctgccaccacgccgggctatttttttttttttatttttagtagagacggggtttcaccgtattagccaggatggtctcgatctcctgacctggtgatccacccgcctcggcctcccaaagtgctgggattacaggcgtgagccaccgcgcccggcctacatcgtgctttcttggtcatcacagaatcctcagcagtcaataaactttgaataagtgaaagtgtgggtattgggagagtaaggattaagttgatgcaacatttttagcctgactggttgggcacatggcagtggcatttgctgagatttgaagcaaagccagaagaaagggctgagcttgattttgtgttttaaatatgcaagggagaagatgctaagtgcggttgtagatatattaagtttgatgctctttttctgattattctgtaagtacagcgttgtcttcaaagtccactccaaatactaccaagtattacttggtgttgatcagaagtagggtttcccctcaactttgtatgcttgacaatatgatagaacttgaaaaaaagaggaaatctaggaatttaagaaaaaagtctgaacagcatcattttgggatataagtgaagtagaactgataggaaggggaacacatcctctttgcctgaggaagttggagtagttctacctctgttatggcatttaaaaattgtatatttaatttttcagtgtatttaacttctctttgtcctcttgaagttgggaacattcagttgtactctgaaccagtggatattgtgacctggcgctgtgccacttgggccagcttttgcttccttaatgaatgcacttccttcatctgttagtgataagcaggcaagtgaggaattcttatctgcatctatggattgaacatctgtttctattccactgtgtttcagttttaacttctttgcttagaaattaatgtgagcaagtgagcctcctctttttaaagccattttggattgagagtatttgttttctgagcattttatatgcattaaattgataatttagattttttttctaatgttttgagtgatacagaaatcatcatcatgggtttccttaaatttctgtggcaatgggcttattaaaaatgtaattttgtgcatggtgatttttggagggatatcaaacttatcctatgggtgttcagttttgtcagagagttatgatacattttattctgcatattaaaaatgttccagaaaggaaagcaaaaaaatcaccatggcaactcagtagaatgcccttattttgtttttctgaaaggaaaattctaaatctgagtaagaggtataaaaaagagcagtgcagattgtgtctctggcttccaggaagtgagctcataaaagaatgggtttgatgccctgggtgactctgtgttatttaggaccccatttgttttttctcataaggaagagctataaaaaggtggcgtatatattgacactactaaaacagatctgccaaagagcctgttgaatttttctttgtaatgcaactttttggagccaactgtaagtgtcaaggctaaggatgaatggatagctgcaggggttggtgggggaaggttcttaaggtgtcatcacaccacttttgacacttcaacactgaaggagtgctactagggtgagtttgattagaatgattctagcagagtgtcaaaaaagaaataatacatagtcaatgaattgatacattgattaatagtaaaaagtagaatcaagccatgtaccatttttgtagagagactggtgggcagatcagttgtcaacatggcatccagtagtagcaccaaactggtcgtgtagaactcagtgtctgacctgtaaatggttgctattccagggcttctgttacccttcttggggaagcaccagaggacctacaggaacatcagtattccttagaggagggatgaagtgctcaggcatagatcctgactgacaaggctggaagtagcttgggaaagttacttaacctctccaaacatcagttttcttatctatgaaatggttatggttataacagctatcttatagggttgttttcaggaatacatgagttaatatgtacaaaaaattaaaagaaatgcctgaaacatagtaagcaccaattattagctctaattattgaagaatctacaagtgatgcttttttttggctgtgactttcctatattggatatgtttatgaaatggacaggcaaacaattagtttttgttgttgttctttggtaattactttgtaataagttaaaatgggatgggtataaatggggaggggatatattgaaacccaattttccatgacctggcgtcatgtgggatactgagagatcactgacacatggaacattctggtctgtagcatttagggaaaatatggatatttagcaaagatgtatctaagggacagcctaggtaacttatcagttcaatagtgaggtttctgatgtgcatgacatccaggggtgagatttctgctgttatatggtaggaaaaggaattgtatgctgttttctttactttaattgtttttagccaaagtagctgttatagctatatgctatggtaaaacactgcagcttttggttgttaggaaactgttgggttatctgggctcttctttttcccaagttctgaagatgaagagctgcctatcagaaggcacaaaaagaataaaacagtttgtggcttctgagacaaaaattgttatctatgacaataaataaatactcatgcatactgtattttttaaagttaaacaatatttattttcatttgtcttattagaaatgatgaaaatacagaaaatgagaatgtacagataacatacatgagaacatacattgttcattctttatagaatgtatgtacattccactcataatccttttgcacagaaatctacttacatgaacattttctgggtacatgcacgttgatgtaaatggggctcatatgctttctattttaaagtacattataaatacatttattttacaatgaatatacatttcctatataattgagtaattcataaagcaatcaaaggatagaccaaaaaaattattgaatcattattctttatcaatgtgtagattatttccaatttttatgaacatgttcttaaataacaggactgaacacttgccagccaggcagaacaatgagcctccttcaacctaaagggttatttattttaacagagccaaggcagcagcttctctgtgcatacgcacctctgggaagactgttttctgatgaaggcatggttttattcagcatttgatgacaaatccacaccagtttagtgaaagagatatactcatgttcagtgatgcaccaaggaagggcaggttattaccttggaagtctacatttggcaactatttcacaaattttgccagtcaaaacttgatgtgaagattcttaaaaatttaacttagccgggcatggtggctcaatgcctgtaatcctagcactttgggaggctgaggcgggtggatcacctgagctcaggagtttgagaccagcctgggcaacatggcgaaaccctgcctctactaaaaatacaaaaattagccgggtgtggtggtgcatgcctgtaatcccagctacttgggaggctgaggcaggagaatcacttgaacccaagaagcggaggttgcagtgagctgagatcgtgctacagcactccagcctgggcgaaagagcaagactctcaaaagaaaagttaacttaccacagacccagcaattctacttttaggtagctaccttagagaattgaaaacatatgtgcctacaataacttgctcatgaatgttcctagaagcattattcataatagcccaaaagtggaaacagcccaaatgtctatgaactggtgaaagaataaaggtggtatatccatacaatggaatactctactgtttgacagttaaaaggaatgaactaccaaacctcaaaaacattatgctaagtgaaagaaaccagatgcgaaagactgtacattgtgttattccatttatatgtgatgtccagaaaaggcagatctatagagacagaaaacagagttgcctgggctgcagatgggtgtaaccattaactgctcatgggcaggaggaatctattggggatgttggaaatagtctaaaacgcatttgtagtgatggttgcacaattctataaattcactaaaacttatggaattggacttttacaatgggtgaattttgcagtatgcaggctatgcatccattaagcttttttgtttttgagacagagtttcactcttgtcacccaggctggagtgcaatggcacgatcttggctcactgcaacctccgcctcccgggttcaagtgattcttctgcctcagcttcccgagtagctgggattacaggcacctgccaccacgcccaactaatttttatatttttaatagagatggggttttgccatgttgaccaggctggtctcgaactccagacctcaggtgatccacccgcctcggcctcccaaagtgctgggattacaggcgtgagccactgcacccagcccataaagctgtttttttaaacataatgaatggtatttgattattaaaacattgaaaaggaaattggtaagatatctatagtacttttgtgttttttggctgggaggtggccagagtgcaactttctttggtcatctcatatcctggttcctctgacaccagctgcctctcccataccacctaagtttgaccccagtgagatcaaggtcgtatatctgaggtgaaccagtggcaaaatcagagccacatctacccctggcctctaagatcagccccctgggtctttccccatcaaggttggtgaggacattgctaaggcaaccagtggttggaaatgtctgaggattacagtgaaactgataaggcccaatttgaggtggtaccttatacctctgccctcgtcatcaaagcactcaagaaaccatcaacagatggaaatagaaaaataaactcagtagaaatatcacttttgatgagattgtcagcattgcctgacaaatgtggcactgatctttagccagagaactctctggaatcattacagagatcctggggactgccccgtctgtgggccgcagttgttgatggctaccaccctcatgacttcatagatgacatcaacaatgacatggtggaatgcacagctcgttaagtacagaggaaaatatttcagtgaagatcatttgacaaccaaccaaccaaccaaacaaacaaaaggacatcaacagaagttcccaacctgcctgctcatcagaatcttttgggaaataaaattaaataaaaaaagagtcctgggcctgacctcagccttaggattcctgttttcaatgatcttcctagatcattggctagtcaggttggaaaccactgctttttgtgagccattgctccagatcctgaactattctgaaaaataccaagacagacgtagtcaataggtgcttatttcaccttcccttctggtgtgagctaaatagatgtcaaatcccctggctccccatggtttaccttgaaagcctttcttctcctacttaaagctagacttggtgcttctctgcattcaccttaaggaattgactcactgcagaagcatcagcagcaccattttttttttaactggagagacaagaaagtattagctacagagcacatgacattcctgctctcccaagttctaggtgtcccttcctgtgacccttctgccatcttgctgtcctgtgcctctcactccactactttctgaagcttgggtgaccctgtgtggtccaatcttctgctctacctgcatctctctcagggagagagagagagagagagagagagagagagagagcgagagcgctcctcatgctggggagcctctctgcctccctggaattccggggagtacagttttctttatcttgttgatgagttactgtttgtttcttctgtgtttatgtgttctgcttagttcaactcaactcatcaaatacttctcatgtagtgcgtaaggtctgccatgcgtggtgtgcaatgttaccaagggatgcattattagatggcatcaaggcacctaggctttggcaattagggttgccagatttagcaaagaaaaatacatgatgcccagttagatttgaatttcaaaagaataacaaattttttattgtaaacatatcactttatctgaaattagaatctaacgttgtatcctctatttcattggacattcctaaagtttccatcagacctggttttccttttggcttttccacttgaatagttaggtactcagtaggttacttaacatctctaaactttggtttccttatctgaaaattagggcaaatattacctgtaagtgtgggcttccttccttctcagtggactccaagctcatggggaacagtggttagccctctgtgccaagtttagaacttatgcttacattttattgtctgaaatataatcagatggccacacctagctctaagagtggcttggatatggtccttattctgggcagccacgtgcctaaagtaccaattagggattctcttatgtgggaagaactcgggagcaattaacagtgtttgccacacacttttttttctgtctacaatactgttaaataaatgctattgattaaacacatttaatagaataaaggccactacccagttgcaacaaatcaagaaattgtttggatcactgccaaggatatagagtaggggattattcttggattcaactcactagctgacctgtcctgccatattggaaaaatattttaatccttaagtgctctagtttcttcatttgtgtgaagcctatgttgactggggtcacagacataattacatcatatagctggttgctgatccaattgttggcaatttcaaaacgtgccacctggattttatataccttctattttcttggtgactaagttaaagtagaggtggatttttgcagaaattaggttctaacgtcagcacatagaacaaacattgtgtgtagttaaaattactgaatgtgggctgatatagtgactcatttttaacagacagactaggggaagggaaaaataataactttacagtggagaaatctggcagacaccaccttatcaagtattcaagatgaaccttcccaacaagtcatggtgcttctgaagagcacttcatctctgtggtattcttctcccaaatctatgccccagattaatcatgacatagcatcagacaagcccaaattgagggacattctacaaagtatccaaccaagcacccttcaaaagtgtcaaggtcgtaaaaagcaagcaaagactgagaagctatcacagattgatggagactaaggggtcatgataactaaatacaatatggacattagtggaaaaactggtgaaatccaagtaaattctgtagttaatagtgttgtaccaatgtcaatttcttagttttgataaatgcactatggttagataagatgttaatattagaggaagctggataaagaacatatgagaactctctttgcaacttttcttaaatctaaagttattccaaaataatttttttaaactactcctgaaattctcttgaaaatgccctatgttgtgaatgagaaccatgtgataccttgaaagaagattaacatgtcaggttttcttccagcattagggcagattactgttttcttaataggtatttaacatgaatttttctggtgctggtaatacagcagtgagaaaacagttaaaaaaatctctgccctcctagagcttacattctagtagggatgtaataaaagaaataagcaaaatgtattatctgtaaaatagtattaagtgctatggaaaaaataaagcaggaaagaaagtattggagggttgataaaagtttagaggtctaaagatgtcctccctaagaagatgactttaatgtaaagacatgaaggaagtgagaaaaagagccacatcagacaaactcaatggatattttggagaaaagcattccagatagaggaaatagtgtgtgcaaaggccctgagacagcacttgcctggtataactgaagaacagcaagggatgctgtttgcttacttgaaccacagatagagtagctagttttcatttggagtcatgttgtaggaaaaatgtgtgtctttgaattaaactcagcttggtgagttacttacattatgagaggcatgtgggaactccacctgattgaaggggcagtcttcttccatctcatctagggtcatatgcttatccagtgaaatggaaggctaaactctccacactattgaaaatgttataggccaggcgcagtggcttacccctgtcatcccagcctgtgggaggccgaggcaggtggatcacttgaggtcaggaattcgagaccagcctgggcaacatggtgaaaccccgtctctacaaaaaaatacaaaaattagcctggcatggtggtgcatgcctatagtctcagctacttgggaggctgaggcaggaatcacttgaatctgggaggcggaggttgcagtgagccaagatcgcgccgctgcactccagcctgggtgagagagcaagactctgtctcaaaaaagaaaaaagaaaatgttatatatcttttattttttggtcgagcacatgtaatttatgttgaatttgttaaaggcaaagaaaagatgtttactttatgtgccaactttgtgatatgactacagagcccattcatgatgaagacattgagtgttgctaggaaaggttgacttactccttgttggctgcctgttgtctctggctttcctcgttgaatgtgtactctcctacctgcttgggaggaagtggccaggaggagtgtgctgtgtcttttttccctttggtagacaatgtggctgctgctgctggtggtaaattatgatggttctactctgcccttcatgaatgtcactgtcacggcaataaagtgtgcattagtagagcatgggattgttgcatttggctttagaatgtcctttgataaagaattcctttattatgggtcctaaaaggcaatctctttaaatgtacctttcaaacactgggctagttatatagatgtgtgttccagttactcatgtatagctagttagtcccatgatggagactatatggctgaaagcctgctaggaataaaagaaaatgagagtttcttctacagaatagagcattatagtttcatttggagcttgaatatcttataacaaataccatggctttaaagacatataacagaaggaaaaacacttttatctttaacctataaaaatgtatccctcttttaatcatctagaattgtatatataaatataaactgtaaaattagaaagacctgaagatacttgaataaaaagaaataaaaatttcttttattcaaaatgtatctttatcctctggcttagacttttccatctttaggagatgtataaaatggaaccctttcaattgaattatctcaggaactcgttttactgtgtcattaggaaaaataacaacggtttgggaataacataaaatatccttgtgtctgaagtatctgggtttaagtagaaattttatatcatctgggggcaactttttatttttgggattgagttctttgtctatgtaaacttactttatgtagttttaaagtaactacataaagaattttccttccatttccgtagtgtgctaggccaaaattggttctgttttatgtattattgacagttttgattgagtcctaccatacctttcagggaagattgttgaggtggttgctgtggaacgttaaggaacgaacactttccataggaccctgcttgtggtattctgatagaatcagaagttagattcttgggttacacttaaacccttccaatgaaaaggactttttattatactctgaaatgagaatgaaatattcatttgcttggaacctgttaaattcttaaatttcatataggagttacagaataaagacctattgttgactaaggctaatctgaaaatctctatcatacttctctgcaagctgtaaaagctgtgcagctgtactctggggcttggtatttaaaacctttggatttcctgagattggtagtgggaaggagtgtagaagtgaaaatgccaaggaaattactgctcttcttgatcggggattgtaggtacttctctgacctttaattcaagattccttattatgagtcaccttaatgttcccctggaaatcacatgttttggggaacacctaaatagctctcttcattctgtaattggggaatatgtagggaagggtagattattcatagagcatctttcgtggtggaggaatctgagtgcttggaggccttgcagcaggaagtggcatttacaaatggtgctcagaacaagaacactgcctgtgtccctagccaaaaagaaactaaggacctagcatgagttcccattaaaatctgtgtggactgagtcattaaagctaagttaacggcttcacttttttctttggccaaaaggacaagacatacttcttgatatctgagaaactgaactgcagatgaatttaaagatagtattggggtgcccagtttctcttaaaaagaaaaaggaggggaaagagaacaggcttgtctatgttgtatggttcttcaaatgttaatttaagcaaaataatttgatttgactccttgaagcttaccttggagaactataatttgatagactattttatatttttacaatagattttcttcatcagctagactagtagaagttaattttttttttttttttttttgagatggagtttcgctcttgtcacccagtctggagggcagtggcgcaatctcggctcactgcaacctccacctcccgggttcaagcagttctcctgtctcaccctcccaagtagctgggactacaggtgcccacccctcccacccaccacacctggctaatttttgtatttttagtagaggtggggtttcaccatgttgaccaagctggtctcgaactcccgacctcaagtgatccgcccgccttggcctcccaaagtgctgtgattacaggcatgagccaccgtgtccggccgaatatttttagtgatagtataattgtgtttacttttggcctcatgagagaaaggaaaatatactattctattaaatacttcttggtagctgggtctcaattttcctgctcttaggtctgggcatacttttataaaagtcttgagtgtattttttttctattatggctccatgtcacccccattcattcattcagcaaatacttattgagcatctactatatgtcaggaacttttctagctcctggggagctagctcctgccttctgggaacttaggttctagagggtaaagacaaaaaagaggcaagaatgtatgtcagacagtgataagtgtcatggagaaaaataaagtagggcagtggagatatggattatttggggaagggaatgtgctgtgttttaaggtgatcagggacagtcttactgagaaggtgacagtggggcagagacctgaaaggaatgagggcgaaagccataagaacacctgggagaagagctccccggtaatgggaacaacaaggggagccagggtggggctgtgagtgaggaggagcagtaacagaagtcagagtgtttgtggggccggatctgtaggatctcatagccaagagaaggatttaggatttttttcctgtgtgagttgcatcctaatacgattgttgatatttcttctgcccaacctccttcattttcctataccatttccagttgtttcaacatgtaaactttgttaaggtttcaaaaataaacagatataacccaaataacaatgtattaaatgcaaaagattgaaatctgcatgtctatttctactaaacctctcttctttatatgtgtcatttgctggggaaagcagcatttgctactgacctatttaaatatgctgagctcagagcccttcccagcccaacaagatgcacttaaccctctgtggggatagaaagttgatagattgtttcgtgattgtattgtgcgggtttttttttgttttgttttcttttgtttgtttgtttgtttttgcacctgactttgatatttatctgtgtctgggcattttttagaaagtaagctctgaaggccaggtgcagtggctcatgcctgtaatcccagcgctttgggaggccgaggtgggcagatcacttgaggtcaggagttcgagaccagcctggccaacatggtgaaaccctgtccctactaaaaatacaaaaactagctctgggtgtggtggcaggcacctgtaatcccaactacttgggagggtaaggcaggaatcgcttgaacctgggaggcagaggttgcaatgagccaagtggtgccactgcgcttcagcctgggtgacagagcaagactgtctcaaaaaaaaaaataaataaataaaaagtcagcaagctctgagaagacaggtatgtttggagtataatggttattgtgattgattccctgacacccagtccaccccactatggtcatttcagttgactcccttatgtcaagtccctcctcctaagccactcatggcattcctgtgctccttgctggttatttattagttaaggattgggccattggtttggtcatggctaatgttgagggagcttctatgaaggatttccttgcttctaagaaagacacggagagaaggttgcctttcttcctttggtcattgctgtgtctggttgtgatgcctggaattgctgcagttattttgctacccgcctgagaatgaaattagtatgttctgagctacaggattatctaattctgggtccttctcactttgggctttttatggcatgagatatatatcctcgttgtttgagacaggtttatttgttttgtttacagctgaaagcatcctaactggtaaagatgtattaattcccttcctgaagtttttttttcagaatacgttatatggatttacatgcagtgtttttcagtaatatttagccctatggattccaaacttactgaaatgatttagcagattagagtgggaatgtagtgacattaagttgcccttgttaacatctggagttttgtttcataaaagcagtatgaaaattttgtgtgtttaaagagctgaaaaggaaaaataaaagaagtacagatacagaaaaaaaaaacaaggttattagactgtgttgttcaaatattctgtagctgtactaattttcgttggcatatttgtaattgaatgtgctgtactgaaacctcccattatgatggtgactttgtcaatttctccttacaatcttatcagtctgacatatgtattgacatttatatatttatatttctctagattattttcttagatgcgtagagtttataatggttatgtctttctggtgaattacaatttttatattatgtaaaaaaataaagagctgaaaagaccttttagaccatattaatttattttaatgattgtaccctgctctttaagttagcaacatctgaactatcaatagtagaaaagaaaggtaaattatatgatacaaacccatgtccatgtaccagattcatcacagctattcttgcatgagcccagatactttaaattaaaaaaaaagaaatgttgaagaacttggaattcatccctttatcccattcatttattaagagttttcttttttttttttagtttctattatttttattttattttttattattattatactttaagttttagggtacatgtgcacaatgtgcaggttagttacatatatatacatgtgccatgagaagagttttctcaagcacaggtaatcctagcaaattgagacatcaatatttgagggttttaaggtggccagactgtgggctcatcaatttccgtacttttccgtcatccaactgagttttgtgggtgaataatgttaccattttatttattttaaagcaacatatttggtattttttttctcacatatctctttttgttcttatagaggctaggagtagaactttgctgttcaaatggggagtgagcagtaaaattaaaaaggttggccaagaccctgggaaaatgcgaacagtgcgtgtcttttttgcatctgaactgaaatctgagaggttcctaggttctgcacaaggtagctttgtgcatatttctctgattgctgagcctggagtgagctacctgacaggcctctgataatcaattccaaagcacacactgttctctttcagcatcttgtagggaaaggtggacaaagagtgtgaaataaatattctcttcccaagtctcccatcccaagtgtctctttgaggtgggatactgacgaagacttaaaaatacccatctcgcttgctccctcccacatccctaaatacaacaagcagcaaacaaccccaaatgcctaacaggaagacagttcctttttaattttggcaaaatctaggaactctttgtgttgtggtgtccagaaacataaaaggagaattctatgaaaagatttcagctaattaacatttacagggtgcccattgctgtgccaccatgtgaggtgttatttaagctttgcagaggtaaattaaaatgtgctttttgttgccttgcctgcttaaaggggaaagcagaggcatgggatgttattataaagtaaggaggttgattttcatgtgaggcctagtgcaaatcagcctgttgtttattctgaaaagcatgctgttttctacaattcagacttcattatttatttgcttgtttcttatattaagattgctcagtggcacaaataaggaaaaaaaaacccataagaatagagaggatgaagggggcagagaaaagggagggaactcagaaggtgaagaaatattgtggtttgcctgagggaatctgggaagtaaggagatggaagaagttgggcgatcctttcagttaaaataagtgaagacagttgtgggttaggagaaataagactttctagttatgaagatcttacacatgtaactggtcaaatattttagattctagatggacatttcaagagaagaggtaatataatgtaataaaaattttggctaatgattaatgactgcttaacatgtatgtgttgaaactgatggagaacaggactttatatatattactcagctaactttacttgtaacaatcctatgaggtggatactctttttttttttttttgagatggagtcttgctctttcgccaggctggagcgcagtagcgggatctcggtgtacctcaacctctgcctcctgggttcaagtgattctcctgcttcagcctcccgagtagctgggagtgtgccaccatgcccggctaatttttttttttttttgtatttttagtagagatggggtttcaccatgttggccaggatggtcttgatctcctgacctcgtgattcgcccacctcagcctcccaaagtgctgggattacaggcgtgagccaccgtgcccggccgaggtggatactcttttcatttccatttttttttttttggtctttttttgaggaggaaactgaagcttagagagattacatttcctaaagtctcagctggtaagtaataaaaccaaggtttggaccaagactgtgcccctaacggctatcctatactgtatctgaatacttgaggaaataaaatatacaactgaaattattttgcattttttaaagaaacagtagcaataggggcatagaatcttaaaatttaaaaggtcttagaggtcagattatagagaaaaaaatggaagtccagggagagttcctaaactgtgtcatggggtaccttggaaaattttttacctttgtattcaacttcccaaaaaccataaaatgcataattttctctgtcaatttttttccagttttttgttcattatgaatgtcggggaaggtatctattttaaattggactctgtcataagtaatgcttgaagaattacatgttgtgcttggcaatttgcactgcatgcaaagctggaatgtagggaatttttctgttttgtactctctctcttattatgtgtagggtaaggagaatggagccctaatgcagtttctttaggaagtgtagtacaccaccagtagttaaaatgattattatgcggtaatgccaagggctgtagaatagaatttaaacattacttgatgttttctagatagatcttaaaatagatatcgatataaaacaaactggaaggtacagaaaattaattttagaatgtcaattctggatatattttgatgagaatatgagaaagtagccacaaatcacaccgtgcaccatgaaatttgcaacagaaatttcatagccaaatatatttaagtgttcttggagcccgctttttgttttattaaaaaagacctatccaaatttgtttgagttcattgtagattctggatattagccctttgtcagatgagtaggttgcgaaaattttctcccattttgtaggttgcctgttcactctgacggtagtttcttttgctgtgcagaagctctttagtttaattagatcccatttgtcaattttggcttttgttgccattgcttttggtgttttacacatgaagtccttgcccatgcctatgtcttgaatgctaatgcctaggttttcttctagggtttttatggttttaggtctaacgtttaagtttttaatccaccttgaattaatttttgtataaagtgtaaggaagggatccagtttcagccttctacatatggctagcctgttttcccagcaccatttattaaatagggaatcctttccccactgcttgtttttctcaggtttgtcaaagatcagatagttgtagatatgcggcgttatttctgagggctctgttctgttccattgatctatatctctgttttgataccagtaccatgctgttttggttactgtagccttgtagtatggtttgaagtcaggtagcatgatgcctccagctttgttcttttggcttaggattgacttggtgatgcgggctcttttttggtttcatatgaactttaaagtagttttttccaattctgtgaagaaagtcattggtagcttgatggggatggcattgaatctataaattaccttgggcagtatggccattttcacgatattgattcttcctacccatgagcatggaatgttcttccatttgtttgtatcctcttttatttcattgagcagtggtttgtagttctccttgaagaggtccttcacatcccttgtaagctggattcctaagtattttattctatttgtagcaagtgtgaatgggagttcactcatgatttggctctctgtttgtctgttattggtgtataagaatgcttgtgatttttgcacattgattttgtatcctgagactttgctgaagttgcttatgagcttaaggagattttgggctgagacagtggggttttctagatatacaatcgtgtcgtctgcaaacagggacaatttgacttcctgttttcctaattgaataccctttatttccttcccctgcctaattgccctggccagaacttccaacactaagttgaataggagtggtgagagagggcatccctgtcttgtgccagttttcacaaatttacaagaaaaaaacaaacaaccccatcaaaaagtgggcaaaggatatgaacagacacttctcaaaagaagacatttatgcagccaaaagacacatgaaaaatgctcatcatcactggccatcagagaaatgcaaatcaaaaccacaatgagataccatctcacaccagttagaatggcaatcattaaaaagtcaggaaacaacaggtgctggagaggatgtggagaaataggaacacttttacacggttggtgggactgtaaactagttcaaccattgtggaagtcagtgtggcgattcctcagggatctagaactagaaataccatttgacccagccatcccattactgggtatatacccaaaggactataaatcatgctgctataaagacacatgcacacgtatgtttattgcgacactattcccaatagcaaagacttggaaccaacccaaatgtacaacaatgatagactggattaagaaaatgtggcacatatacaccatggaatactatgcagccataaaaaatgatgagttcatgtcctttgtagggacatggatgaaattggaaatcatcattctcagtaaactatcgcaaggacaaaaaaccaaacaccgcatgttctcactcatagatgagaattgaacaatgagaacacatggacacaggaaggggaacatcacactctggggactgttgtggggtggggggaggggggaggaatagcattaggagatatagctaatgctaaatgacaagttaatgggtgcagcacaccagcatggcacatgtatacatatgtaactaacctgcacattgtgcacatgtaccctaaaaggtaaagtataataataaaaaaaaagaaaaaaaaagacctatccaaatgctgaaaatgaaactagtaggaattatataaagatgaaataacttatattgaggattttacatagttatcacaacttagatatttttctattcaaaaaataaaaaagcctagtaccatatctaggaaaacagactaatgctgtaaaagtgcctcagctatccaatagacattttattactaaaatttctcctgggggtggtgggggaagatggaatttcctggttgatttatagcatggtatttaagatgcaaagaactatgttgctttgtttcatgggacccatcacgccgggcacggtggttcacaactgtaatcccagcagtttgggaggctgaggcaagcggatcacttgagctcaggagttcaagaccagcctggtcaacatgatgaaaccctgtctctactgaaaatacaaaaattagccaggggtggtggcgcgtgtctgtaatcccagctattcgggaggctgaggcaggagaatcgcttgaacccaggaggtggaggttgcagtgagctgagattgtgccactgcactccagcctgggtgacacagtgagactcagtctcaagtaaataaataaataaaataaaattaagagacccatcagtgttttgtgtttggttactctccagtaataactttgtaatttccacctagctcctgcattgatcttgcatttttcaatccaatgcattttggttggtctacttatacacttaattcccatagcaagcctcattaatctcattaattccatgccctagtgaactgctgagaagaaaagttgtcattaccatggattctatcacatgaagggatggaatggtggaaaccaccttccgttttctccctctgtctctgttttgctgctgtccaaatatttaacattaaaagagtattataaaaaacaaattgatttcagacatttgagggataacatatttgagatttaatgtatttggggaactgagaagtgtttgatgtgaggtagaggtacaaggaaatgggagtgggttttatatgcataatagtgcatgccagagctaggataggctagaggctagattatgtgtcagttacaaatgacccccaaatctcgttggcttgcaccatagacattttttcttgctcatgctatatatccaatgtggattggtacccagactgacagagacttccttcaccatatctccaactatgaccacccttacagtggggagggaaaggagctttctgttgagacatgattcatgggccaaagcaagtcttacagcaatgcccacctgcaggtggggaggggaagagccatcagactttgtgtctcaacaggaagacccgataccaatgacagccagtactgttccctaacttttcttgagaaagagtgatatcagtaaaggattaaggtgggggcagtgccaaccacttcagtcttgccttgctccttggggagtattttcttttaaaaaaattgattaataggctgggtgcggtggctcacgcttgtaatcctagcactttgggaggctgaggtgggtggatcacttgaggtcagaaatttgagaccagcctgaccaacatgatgaaaccccgtctctactaaaaatacaaaaaattagctgggcgtggtggtgggcgcctgtaatcccagctactggggaggctgaggcaggaaaatcacttgaacctgggaggcaaaggttgcggtgagccaggattgtgccactacgctccagcctgggtgacagagtgagattctgtctcaaaaaacaaataataataattgattaacaatattgcatatggaggcaaggacccaatatgtgattccagggcatgttagttcattctcttcttcattcttttgttccttcactccttcactaaatatttatttaaagatcacatatcaagtacatgatgtgagtgctgatatattttattgattttgcttttgcttgtgtaatctgtagtgattatttctttaacccattttttctgtcttgtcaatttttagttgcactcaggagcagccttttgtttgcatgtttattttgaatctgttatttcttaaattccttcagggtgtgcacctgatctgttttctttaccgtactatccacatgtattattagtaaatatttgataatgagagagaaaccatagtttattggttatatctttttcaatatttctctgaagcagttttgattttaaaaaactatcccagtctattagcattttaatcagcatcttgaaattttatctgtaatacacaggtagaatttttcccttgctgttttacttgtagagtcaaatgactctagtatgtgttgttcaggtgacacaaaaaaacctctgcgtaatgagtaaaattatcccagaggagggagctcttttagacaatgaaacatagtggggtccttgagtgcaactaaaatttcttttctgattaatcaccgtccccttgattcatctttgcttggtcttgtgtatttccattgcatagtctgacttataatgtggttctgcagttgagtctttcttagaactgggtgatcacaggaagttatcttatttatctttgtagtccattacccctcctctcaccctacaggccttactcagtaacttgtgcatagtagctgttcaataaaagcttgttaaatattaaggtgatagatatcacagttaccctgatttgattatatgaatgtatcaaattatcacctatacccctaaaatatgtgcatgtattatgtatcaatgaaacataaaatcttgttaagggatttgattttcaatgatgataggggttgtgcttttgaagtgatgcaaggctaagaacaaaactgtaattgtttaattcagaaagtagttgtggaatggagtctgaagggagacacgacaatatggcctgcacgaaggaagattttgtgtatagaatgttctagcctgtttagattgccttgacttgtgtcaggggagcagtttgtttcactttgcctatataagattaatgtttctgagatgaaaaaaacacacaaaaaaggagctttttgacgtaatcaagcctctatcaatcacttcttgcttcctaataacttttgtatcttcctttcaggagagcagttgaagtgaattcttctgggaccaaatccagtgtttctgccttgaagaaacataattaactgacattttaaaagccactttatagacctgttctgactctggtctaaggacattacttgatttatagtttatgaaaagtctacttttagaatttgggtatgttttatggtagctcttttagttgattgctttcatttttctttgggaaattatctagaatagctgtagtgatgtcatcagaagcttgacttttacctctgtgtacttagagggctgactgacgcacagggaaatatttcaccatgaatggtgaggataagcttatgtgtgtaaggaaaaggtaactgcactgcaagcagcttccccctccctccctctccagggaggggatgatagctattattaattgatttttctcttactatggaaaccaagggtttagatattaatggaaaaaaattattgaaatgtcaaggattttgttttgtggcttgggttccctgaagcctagcttgaagagaccagcagtgaattacagtgtcgcactgtaaagacactgacaagatttttgtcattaaagttaaaaatattgcagcagattgcctgggtaatcagaccttcctttgatgtgtgtggtaagaattcttattcaagggaactgaggcgggatatatattcattattagagactccagcgtggatatgattttaggtttcaatgaaaagctttcttccagaattaccatgcttgaggaaatatgattaagagttgatcacatttgttcaccagccacagacattcttgccagtttgagagcacgggtacgagtgatctctgtgcttctaggcatatgcacctatcattgttgggtcttccaaggatctaatatgtcaatccagatccatgcatctggtggctttcatccctctgcctggagcacagcctcactttcatgataatggatgcccttccaactttctaataaggaggctttgtgttggtcctcgtgtttgttcttgggatataggtaaaagaaaaaaaaaatcctttgaaagtctgtaagtccacactgggtgcttccctgtcatctttttttcttgagacagtgtcttactttgtcacccaggctggagtgcagtggtgcaatcatggctcactgcatcttcgacctgctgggctcaagcgatcctcccacctcagccacctgagtcgctaggactatgggcatttgccaccatgcctggttaatttttaaatttttttgtagagaggaggtctcactatgttggccaggctggtctcaaactcctgggctcaagtgatcctcccgccttggcctcccaaagtgccgggtttacaggcatgagccactgcacctggccccccatcatctttatccttcaagtaaagagtcctggagggactggtccgtgtccataggtgaggagtgtcagtgttgtcacgtggccaatccgtgccctctgcggaaggtgccaggctaagaaaaatatatcgaaacaagataaaaccaaaccaaatagccacaaacttctcctatcccatagcgaccacctgccccttcctgcctgcttctcatcatagtatcccacgttgaggcttggagggttgagccccacgtctagacttgaatacttggaacatgtgaggccaactgctgctactttcccaggttcttgtgatttaaactctgggctactagtgctctggacacttaaaattagtcacttagtggatcaactaagtgcgtattgctggacttagttttgtaggcatcatttaagaaattcctggaaacaaaataggaactatttataaagttattgaccttttgccagcatagttccatatagaatatgaaactggtctcatttcatacctcgcctcattccataccttgtccatagttagtgttcaaaatgtcaggtcgaatgaatgaggaatgagtatcagacagatttatttatggaaggcagcaaagtgaacaagggcaaaggcatgggtagggagacaagcctgggagaactttaaggagtcaaggaaaataacagattttggggaatggtgagatgagagatggttgagtagagatggctgggttagagcaggattcacctaaggagcatcccactcagtgcagtaaaagactcgccctgagaaatactcatgtgaactccctttgtgcagtctgtgtggttggatttctctgactttatgcaaatataacatgactccactgtgaatgtgttggtgctttcaagaagctgcaaaactcttactactatcccattttagatgaggaaatggagactcagaagagtcaagaaatctgcccaaagtctcacagttggagcctctctgcagaccctcaaaatatgcatatgtattcccatgtaaaaatgtcaggttttccaatgttcctcctggacccaactgtatagtgttgatttgccctgagtgaaagtagggaggtgacaagaaataggaactaagtaaggttgtttcttgtgtgattttatggaatcaaaaagggtagttgaatcaacaggttttgcttccacctgaaataacatcttcattttgttctgctctttcttaaacatctgtgatggtttaaacttttgggagttcagttggattgtattgagggtaagcttccaagaggggacaactattggccccaacaaactattgccatagaatcttctagcacttaagttagtcctgatgtttctcataaattctagcgatgatcagcaatttagtcttgaaagtaggccttttaactttagttgtaggaatcaatgacacagaattatttgcagctatatcctgatttgaagtagtttataaaatttgctcatcctgactcgctgtgtacatgggctgtgtatagatcagtgtgggagtgtgtgcttgcttcattttgaggactttttattacataagctgaggaacttaacttgaaattctacgatatgactttttattcctgaagtgttgccagggcttggctgatatttcatgccaaatttaaaaaataatattattatttataagcagttacattttaccatgcacagtctgattgtttggctcattatgactcatgagcagctgaaatgtgtggcttgaattttgagtcagttcattaggaaatattcagccaaaaagcatttattggggctcttctaggcccagaatatcaaggagattaatgccgccagtagtagagatgactattaacactatgacatttcaaatttgaatgatacactattgaggtgagtcagaaaatgtatctagtgataactagtaatagcttgacattgggaaaatattgactgttttattaatcttttaagaaatatggacatctttgctataattaaaaagctgccatttatacctaaatgcatctatgttagggaagagggatggtttgatagctataagctggttgggtctttattcagaaattgtgctgacattgacttagagcggttcctataaatgaggtcccgatacagtaacactgcactcatcatttggaagtcaactcttggctctttttgtttaataatattgccagactttacagctgtaccataatttgaaacagtatgaaaactgccctatttactcattccaagcaaaagggctaatagtgttagttttcttgtcacaagttgattgaattgagtaatagccaacttaattcactcttccctggttctttttatcaaaacgttttcttccttatgcaatcattttgatttaaattctttaaaaacaaaagagaaaaacatgctaacagttactcctttattttttatctgcctcagaatagttaagaaaggttatgttaggaattcctgaaaatggggtcatataagggctttatatcttatgctacccaaatccttttatgtaaactggaaaaaaaaatcagattctgaatgaaagcacagggaaaaaagagtcagggctgattttagcagtagcccaagaggatgaatgtattttcatcgtactgccttccagaaacaagggaggtatgactcaagacccagttgatacctgtgtactttcccaggaggctgtgtttatgattcctagggcctgtagattgcatcttacacaatattggattctgctcatttctgttggttaattcagtcttcacattctccagtatagcttcttttggctcagttaagatttgcactcctctcagtttacttctcctgttccattaaggcttatgtcattggcgtcgtaggaaagaattattttttcctgttcccattactgttgttttcttcaatggtccttctttgctctcccctaaaggatctgccctcaaaccactttacatctcgaccagggtgtgatagctctgcttggatgcacttaaacaaaacatgggggaaaatggaactaactctctgtgctccctgcaagacagcacccctcccctgcattgtcaacactgccagcattctcctctcccgtccatgggatccagtgagaggtatttcggtcccagatgttttagggttaatttgtgtgctgctgtttctgctacatgctggttcattagcccatcttctggctttcctcaagcccatgcctagattggtgaaaccgtttctctgatttttctctacacttgacttccatctcattttgccaggccctgctccctgctgggctgacctggcccttacctaagccccacactcatacctgctagcccatccggataaatgaactccattctattgtcttgctgtttgtagaggttcacacagctcaagacattcttcaccaccatcaggttatttcttctcccttattacgttagactccattgaagactcttagtcttctcaaactcagcacttgaatgattgcctgtgtttgtaaagcatttttacagtgtgtattttcacctagaatgtctcatttacaaatgtttctaaaatgtattcaggctaggatttgaatccaggcagtctggctccagagcctgtgttcttaagttactaagttttatatttgggataatagagagatgagaatttggacaaaaacttttatatataacctgttcctttgcttgcatggcattctatctcatcatggccaacatgatcaaaatttctcagccgaaaattactatgttgctgggttttgtttttgttttttttgtttgtgttttttgagacaaggtctcactatgttgcttaggcttggacttgatcttttgggctcaagcaatcctcctgcctcagcctcctgagtagctgggactataggtgcaggctactgcccagcttgctgtttttctttttatcaggaagttcccttgaagctttaagcaaccaaacctgactttttcctctctcacaaatggctgggattcattgccggattgatcgctccaccactcactcttgtggtccaccatctgccaatggactcagcttttagggaaaaaaaaaaggataggctgggtgtggtggctcacgcctgtaataccagcactttaggaggccggggcgggcagatcatgaggtcaggagttcaagaccagcctggccaaatggtgaaaccttgtttctactaaaaatacaaaaattagcccggcgtggtggcaggtgcctgtaatcccagctactcgggaggttgaggcagaagaattgcttgaacccaggaggtggaagttgcagtgagcgagatctctgcactgcactacagcctaggcgacagagcgagactccatctcaaaaaaaaaaaaaaaaaaaaaaaaaaaaaaggatagccctgacacaggttgaaaacctgttacatggatcacagagaatgtgcatttttaaaaaccagcctcattagcagagattattagctatgtccaactaagttcccttttaaaaaaatgttttcttctgtattaaggctgtgacccatagatctcatcctcacagcggggcattggagttggtgcagctgagcagcaatttattaaaggtacaaattgaagatttcatatggcacttggtcttcctcatgcctcttgtagccaaatatttttaatagtgtctgaaaaaagtgtcaagttgaaaattagaggatactaagacatggaatataattaggtactgaagagatatgatggctgttgttctaggtgctgaattgcatatctcaatctgcatttttctttcacttttcgggtttgaagacttagataatcccagtatctacagaggttacttaaggatactaagtgacatgaggttttatagtcatagggggaaatagaggtaaaatgggaaactaaaacgttaatatttagggcagtatttaaaaaaagaatatagtaattgggtcagtttatatatgtatgcatgtgtatgggaaagtcagtgcattggaaaagagagaaggttttttgcattatattctaataccatcatgtgttagaatcatgctttataggtggggaaatgagcagtagagaggctaaatgagagaccaagagactctggggaagtgaggacagagctgggattgaaacacatccttctggattcaagtacacttgacctttgccttctggctgagtggatggcaagaaggatccaccatgtcaagagaaaaaattaaaagggaagatgttcatctaggggactagtgtgatatcactgactttgcactaaaaaaaatggtttagctcaactctgggggttaccagctttgtaacctaggtaagttgctgaagttggggcctcaaatctggagatcctcatagctaaagggaaaggactttttgaggataagcttatctaccacctttgaagattgagataatgtgcatgacaatatctggaacttgataaatgtcaaattcccttctccttcctttacatattgatctgtaagttgtttaaatttttgctcatgacattgttttctcctgagtcctctttgtcttaaaaaaactaacagagagccatgttattatatgcaacatgtagacataataagttttttttttttttttttaaatatcagttttgtgtgttgtaaggtaacttccaggtaagttaccttatggccaaatggtttgaagtctcatggagccatgaaaatgtatctacaatttgacttttttttgagacaaggtctcattccattgcctagactggactacagtggtgcaatcatagctcactgcagccttgaacccctgggctcaagcgatcctcccacttcagcctcctgagtagctaggattacaggaacatgccaccatgcctggctattttttttttttttgtattttttgtagagatggggtcttgctttgttgcccaggatggtctcaaaatcctggcttcaagtgatcctcctgtctcagcttctcagtgtcctgggataatagatgtgaccctggcctataattaacttttaagaaaatagcaatagtagtataaagaccaagagaaatggcaagatgttaacatcttatgccatttgttctggtggcagtgaatatttatttaacatggctattatgctgtggagtggttaatgtccagatcagttccacataatgtaaagccgacctcaagtaggaggaggataaatgggttaaaggaaaaaagactagcagaggttcctgtggtttataaaaaggaagtggttgagggagaagattaatgactgaggattagtaaaccggggttagctggtgcagttttaacgcagaccttaaaggggggcaggggcctgcctttctccagcctggtagaatgggaaatatcattagagggtaataaatatatttagtttaaacttcaattccttatgtttacatgagaaaagattagattacagatttattataactcattctcccaaatatctgggagtaaataaaacatgatataatcctgtattattcatattaacaggatgggggggcaggaagagtgtgtgtgtggacaacataggacaatgaatagtatgaaaaccactgatcactgacagatccctcttctgttttcttcctgaccttcttggtttgacagcactagacgtagccgagttcttagcatgagagaagggggttgagagggagagacaactcacgtactactgaagttgattatcttaaattaaaaaaccgttatcccgatctacccccttaaaaactgttttcctctcaacttctcacattccatgaaatatacttataagcctctaatgcctgacttgatccttaccgtagtgattagagtcagatgtttagacacgctagactaatctaatgcactttgacttggccgcagctaagactgtaaatccgtatgtcagataccgggcgattgacatttttgttatgaccgtaaattatgctggacctggagcctgatgtaaaattatgcattatgtcactgtgtcaactactcatcatggaagactttgtctaatgttggtcctgagtgtgaaatttcatactcctagaatgccaatttcaaatttagatgtcacccatgatgataaggttttataatttgtgctttaaagcaacttaaatcttacaagtgggtctcaatatataaagaataaaattaatgcttttaaggaatgttgtacacgtattgtggtcacaatatcttgaaaagaaaatgttgataaaatggaaagtaaacacaatagagtggttaggaacacggactctggaatcaaaccttagtttgagtccaggtctttcttgccgcttattagatgtttaatctctcttaacctcatcccccctcctccatatatactacaggaataacaatataatacctgtttcatagagacattgtgatggttaattgaggtgacgcatgtaaaggctttaggctggtaccttgtgagtgctcaataattactagctacagttaacaataataatagaaataaatattaagggtaccacccttaacatctcgaatttgtaaccttcctgaaaatgcagagggattaatttctgttgttgttttgatgttgatattgtagaacatattaacttttgtcctttcgctcctgaaagccatgtggagaatgtcagtagtgtgtcctgaagatgtattattgggaggtgacctgataatggatttttaaaaccatctagataaatagataaaataaaattctttaaactttccatcccctctcttgccccctcccctccttgaagagaaattttatggcaataatatgtatatgatttccatgctggaacaaataatctaaattatttgaggttttgaagcagcatgctgcaggagaaaaaggagaggcccaggagtctgaaacccagccttgcccatacagctgtcgtctgctttaggagacaggttttggaagcatcaccagctctgtgatgcttctgtgaccttggttagctattgtcctttatctatgtgtctggtactgctatttgtgtacatgtccattattatgctgggaacacagcgcggtggctcacgcctgtaatcccagcactttgggaggtcagggcaggcagatcgcgaggtcaggagttagaggccagcctgaccaacacggtgaaaccccgtgtctactaaaaataaaaaaaaatagctgggcatggtggcacgcgcctgtaatcccagctattcaggaggctgaggcaggagaatcgcttgaacccgggaggtggaggttgcagtgagccaagatcacgccattgcactccagcctgggtgagagagtgagactccgtctcgaaaaaaaaaaaaggaataacttgcccaccgattaaactgtgagttctttgagggtattttatgtatagtactcaggctggcgctgagtactgacttagtaaagatttgttgagtgattgtgtgaccagcgtcaaggtgtggctgtaggcttactttgctgggtggttttgggcaatttatttactctgaaacccaatgaacctcacacctgatttgtctcctgcaaatagctaatgtgagctcaaatgaataaatgtaaatagtttctgtaatttcaaaatgccaggcaatagaagattttaaaacctggtcacgataataacaataatattgaaacccaagctataatatttaccctggtatgcttcataatagtgagaactggaaacaactgatattttctgtggctcacgcttgtaatcccagcactttgggaggctgaggtgggtggatcacttgaggtcaggaatttgagaccagcctggccaacatggtgaaacctcatctctactaaaaatacaaaaaaaaaaattagctgggtgtggtagcgggcgcctgtaatcccagctgctcaggaggctgaggcatgagaatctcttgaatctaggaattggaggttgcagtgagtcgagatcatgccactgcactccagcctgggcaacaaactaagattccatctcaaaaacaaaaaaaaaaaaaagaaaattttatcactaggttatttgttaaatcactgatgctacacacacacaatatagtattaggcagctgataatatttactgaatgtttaaattatgtgctgttctactgtgaatgaactggtctaggcaaacctatccccaaaggccaagggagctgacaggccaaagaaagaagctgacaaacctagtttctcagaaagaaatagggacttacaaatagaaccagtgtctccggcagctgagagatggtggatccctgcacttggcctgcaaaaaatatctttacatagcaagcttttagggcaaagacatgtgcaactggtcatttctaagacttttttgtgaaatttgtgacttttggggaggttagatacccatctttatgaggggttatctgtgctataggcattgcttctttgtgaggggttatctatgctataggcattgtttctttgtgaggggttatctatgctataggcattgtttctttgtgaggggttatctatgatatgggaacacattggtcatcacagaggttttgtttcaagatcgagtcactccgggtgaaaacagcctgttttcctgcatgcaccaggccctgttctaagcattgaacaaatatctcatttaatctttacaacacccctttgaaatccagatccagagtcctcagtttacagatgaagtagaaactgtgtgactggcacaggaagaggtgcgctgttttgggcatcaatcagaagcaagctgaagagccatttattaagcataggaaaaacaaccctgataggcgatccatccaagaattagtagtcgttatctctggagactagatttctgagggagtttctttctacagggagtcagtgttgctctgttgcccaggctggagtgcagtggtgtgattttggctcactgcaatctccacctcctgggctcaagtgatcctcccacctcagcctcccaaatagctgggactacaggcacgtgccaccatgcctggctaatacttttgtatttttctgtagagatgtggtttcaccatgttgcccaggctggtcttgaactcctgggttcaatagagccgcccacctcagcctcccaaaatgctgggattacagttgtaagccactgtgcccagcctctagagggtattttaaaatttggtttgaaaaattttttttacaatgagcatgtattattttatatttaatgaaataaagcaataaatgatcattcactttggaactatccattttcttaaaaagaagtagccaagaaatgaaatgttaacataactgaaatgttaatgtaattatttgtcattttggcaatgaaagttgtttaattcgagctaaaatagtgcatttgaaacaaaagagagctgcccctacccactacttttcttgttttctgggtctcagcaattcacttgcatttgactttcatttatcatatttgtgaggataggtgaagttttagcgaataagtcatgtagtattaaatctcagtgactgtaaaaaagactacagctttccagccagaaatgcctctttccataagggaacaaattctctgactttcaaaaatttaatataacaaaagactctattctagattgtatggaagttgtaaattttaattacatctgcgtttttctccattcacctggtgtgaagagggagggactcaacctgggtgagcagctatttaagcatctggcacaggaatcttggtcagccacatgcatgtacaggactataaaaaagtccaggtttgcgttgggagtccatcactaagtgtttatgtgccagtgaagtcaccaggccttcaacacccacagccaagagctgtgccgagagaagcaggctgccgctcctgcagtctggttgacaagcctccgtgcccggcacctgcgccttgttgcctgtgggattccaactctgattgttgcctcagaaactgttgttaccacagaactttctcacactcactggcccagacgtttgcagaattccagggctagtgtgtggttaggcagccaaattccaattttagaatgctgcttgtgaccatgaaactctgttaactcaggcttttaaagggctgacacggtgagagatagagagagagagagagagaaactgtgttggggaggaaacagtatgaagatgaacaaacaagcaattgtttattgttctcaactagagaacaaacatatattttgatctccataggatatgagtgttagcagtgataaaacataggtatttgaaatgtggaatgatgctggaatcttaagtcatccacatttcacaaaggattgtgttaaaattctttcagaaaggtagagggcttatttcacttctgaatttccagtcacttcacaatctgcctcagtaaagtgtctcagaattttacatttctaagtcactacgttttgttttattttattttattttattttattttattttattttatttcattttattttatttaattttattattttgagacggagtctagctctgttgcccaggctggagtgcagtggcacaatctcagctcactgcaaccttcgcctcccgggttccacagattctcctgcctcagcctcccgagtagctgggaacacagatgcccaccaccacatcctgctaatttttgtatttttagtagagacggggtttcactgtgttggccaggctggtctcaaacaggagtttgtgatccgcccacctcggcctcccaaagtgctgggattacaagcgtgagccaccatacccggccaagtcattaagttttttttaatgcctacaataaccctttctccttgtgaagcttatggaagagcctacattttcttcctttcctttccccttccttccttccttccttccttccttccttccttccttccgtccttccttccttccttccttccttccttcctccttcctttcttcctccttccttccttccttccttccttccttcctccttccttccttccttccttccttccttccttccttcctccttcctttcttcctcccctccttcttttcttccttcctgcccttttccctcctctccttcctttcttcctctctgccttcctcctttcttcccttccctcttccctccctctcttcctccctccctcccatgccattctgacaggtattattatcagcattgaggatataacttcgaaccagatggaaaagtttccttgccctcaagaaactgacattttggtgcagataaacagataatacatactaaataagaacttcagaaatattaagtgctatgaataaaactaaacaaggtaatgtgatagaggggctgataaatgtggatgaggggggccttctactcttaattgggtgctctaggcaagcttctctgtggagctggcccttcagctgagacctgaatgttgagaaactatgggaaatactgtcagccagacctgagggcttccattttccgtgtgtcagtggtggcaggtggggcaggatggtaatacctacctcacaggatgattgggattaactgaggtaacatgccaaaatgcccagaatagtgctttggtacttaatagccttgaattataatagtagaacttaaaaaggttcccacccccatttttcatgcctgttgaagtattcatcatatcatctgtataaaaatctgccagatatagaggtcagaataaaagatctatcagagccatgccttggattcagggtgtaggaccagacaagatgatgccagaatatagccctgcctcttgagattaccagtggggttaattatgttcctttatttgccaactttatttcaggagttggctggagcttggttatttgatggatgagttggacataggacttcccaatatgaaccacgccttaggttgacttaacccgattcctcctccccaaggaggtgagatgcagggacctctgaaggcagggccaacgtgctggcctccggaggcccttgagatatgctcacatgcttggcaggtcctccactgaaattctcgagttctgctctgcagagcatggaagagatggctttggcctggaaatttgatggcaggtgttaccttgtggctgccaagagcttgatgatagagattcctcattgcaagaacgctggagaaagcacattttactgtatgtgggccaatttgaatttcttcttactagttggtaattgttgtaggctctgcttcaaaaaggtgcatacaaggcttactcaagtaacacatttgtaactaacgcttgagtttgtatagcgtgtacaccttgacctggatctttgggccttactgcaaccttgggggttgttagggccggccccaagaatcgtatccccaagtagtgtggcatactggttaaggggtattgatattctgaagctagacttccacggggttggatccaggttctaccactagcagtgagatcctggttaacatatttacctactctgtgacttggttccttatggtaaagtggagatcattgtgcccacctcataggagtgctgtgagaagtgagttactctatgtaagctccttagagtcatacctgggtgtgaaccaagacttaaatggcggggagagagagacttaagaggtcagatcgctgattcaggtgagcagatttgcagagttgagactcaaacacaagtctgattctaagtctagtaatcttcctactttttcttatgtttaacagttattggttatgattttaaaacataaactcagaaagaagcataggaagatatttaggatcctagtaatagaatcacacactatttgaagtagtggtactgttatctctcctttacatatggggaaactgaggtatattgcagttgttttgcaatgacctgatgttactttggttgatatttttagtatgccattggtcttttcatttctggatcctaattttataagcaatgtaaaaagcataagactgaaagtgttatttccaatattaaaattaaatgaactgtcctgtgaggcaaaactataaaagaatacgattaaaaagatgaattagcaattcagatatcacaatgagattagaggccaggcatgatagctcacacctgtaatcccagcactttgggagggtgagatgggtggatcacttgagcctaggagtttgagatcagcctggccaacatggtgaaacctcgtctctactaaaaatacagaaattagccaggtgtggtggcatgcacctgtaatcccagctacttgggaggctgaggcatgagaattgcttgaacctggaaggcaaaggttgcagtgagctgggatcacaccactgcactccagcctgggtgacagagcgaggctctgtctcaaaacaagcaaagaaacaaataaacaaacaacagagagtgagagagattagagacttttctcaatggtgctgtcattcgtcaaatatacctgaaacttctctttggaaattaccttaacaatgggtatcaccttattttatttatttatttttttgagataaatgagtgatctcggctcactgcaacctccacctcccaggttcaagcgattcttgtgcctcagcctcccaagtagcttggattataggcgcgcatcaccatgcccagctaatttttgaatttttagtagtgacgaggtttcacggcattgcccaggctggtcttgagcttctgatctgaagtgatctgcctgcctcggcctcccaaagtgctgggattacaggtgtgagccaccgtgccaggccaggtatggtatcaccttattttaaatatgctttaaaggttaatattaatttttttaaaagaaaaaatttacttcagcctcaatttagtaaaaatgtagacattacttgatacctttttccttcttcagatatagaaagcagcttcaaaggtagtgcaagaaaatggtatataatcaatttgggactaaaaagctgtttagcttgtgtggccagattgtggttttcctgtgtggctctagcagatacggacatttcttttttctttctttccttttttattttttctttgataaagggtcttgctctgtcacccaggctgcagggcagtgacacaatcatggctcactgccgccttgacctcctggactcaagtaatcctcctgcttcagcctcctgaggagctgggattgcaggtgtgtgccaccacacccagctaatgttttcaattttctgtagagatggggtttcgctatgttgcttaggctggtcttgatctcctgggttcaagtgatcctccgccttggcctcccaaagtgctggaattacaagtgtgagccaccgtacccagcctggggatttaaaatggagttctgttacccagcagcagccacaatgaaatcaatgaatgcccttctgaggggactactgtgaaggctaacattcatggggtgcttgataaacatcagcgtcagacaccctccgtatgatatggagaagtaaagaaagccgcaaacttatgttctggcttgaagctataacttttctttccaagtaatcttttcagggaaagccttttggctttgactacagctatccacaaatggaaagatttgaatttcatgaagtctgggaaagagttttgggtggtatgcacaccaacatgatcaagaggctgttaaaatgaattttgcaaatgagcaaaaagtaatttgcattaaatacaaatatgttgtcttggggttaaaaaaaaaaaaggaatcctgcagagctctgagactgctagcagatggatttgagagtggaaatgggaggggaggtgagaagctatggtggtggtctattgggagaggcaaagaaatgggtcagttgtgggcttgttttgatacaagcaaacaggtctcaagctcctgccttctccaagcctatagcctgggggagagtgagggtgggaccaaaagtcctctaagcagatacattctatatgttcaaaatacatcaaaatattctggtgtctgtgattatcccaatctgggagaattcttgggtgagggctgagaattgagaagttaaattttcggtgaaagtgctataaaggtgtggagtttgggggaaagtaagtgtttaatatgggaaagattggagtggcttggtggagagaagggaaaggtgggttggggataactgtgaagtagcatagggcatctcagtggtgtttcaggctgccagggccagtcaatgagttactctttgcccatgagtgatgttctgagcatcagaataacaaggataggatactggcataccatcattagtgtgattccctccttcctgccttttctttctctcattttgatatgattgactcagactttttaattaaactttttattttctttttaccatgcgtactagccttatacatgtgacgtagggctccctctttccctctctccctccctccttctctccctctctctttctctccctgtgaacatggaactctgctaatgattcaagcagtgatcatgattctgtcttctgatcttgttttatatatacagcaaaagtaaattgagaccgtttggaaataaacacattagtacatagcccagcaccaagcatatagtgagtgttagaagtcagtggaatgaaaccacctgaattacagttaaaagctgttttcacagattcttattggctgcttaaagtaatcttaccatggattcttacaaacccgtggacccttatctgaaactcttggggccaaacgcctttcatatatcagaattttccagatttaaaaaagtttatacagtgcagatagcatgtattatgtaacttcttcagtagcagcacccatatccaaacatatcatttttttttgttttgtaatgaaacttatgaatgttcacattgaataaataaagacaatgcagctgcaagtcagttcaggtcaggttttgtcactaattgagttttcaccaagcttgcatacttttgggtttcagaacttggggttttggaattgtagaccatagtggctttttggaactatttcctgcttatgttgctgttagctgttgcccagtctgccttaaaaatattggattcccctgggccagacagcagctattggtatcattcatcttctgtttcctgcaggaaacctgtacttcttttaggctctgcagcaaagagaaaatcagaaggaaaatcgtctttggtcttccttctgggtgtctgttttagatcctgattagccttgtctctcaattgtaaaaatattcctctcggccaccagattcctcagtcacttccctggtccatctcctcctttatcagtgcttgaagagtgtgacatcgttcattgcttttaacaacctggggtttggcctgatacaaattggttcttaaactaagaagggcatatctgttttccttctgaacgtttaaaaagattttaaacatggaacagatgtaaaaagtaatttgcttgttttaatacagagagagaatgacttctaatggcttcatgtctgggaagggtcttgatcccatgaactgatcctgtctcatctatttcttccttaatcctcttctcttggtcttggtttccacccttgcttttcagtattctcaggcagtttttcttttttaaagacggagtctcactctgttgcccaggctggaatgcagtggcatgatctctgcccactgcaacccccgcctcccgggttcaagcgattctcccacctcagcctcccaggtagctgagactacaggtgtgcaccaccacacctggctaatttttgtattttcagtagagacagggtttcgccatgttggccaggctggtctcgaactcctgacctcgggttatctgctggcctcagcctccctaagttctgggattacaggtgtgagccaccacacccacctggcctgggtggtctctttcttaccaccccatctcttttcttttgcctgctgcctctgctacctgcttctttttaatcaattgtgttcacttttagttgtttacaatcagttgccaatctctgaaaacagtttcctgacaaacacatttcttccctcttcctgttggaggcttttctgtttgggattctgcccacatatgcagacacttaaacttctagtttcatggctgtcttagaggacttgggttgctgggcagctgagagttggatgtctgaggtgctgctgttttaaggaacatttatatgcatgtgagtggttttgatttgaaactaaggatgctaactatgaaatctgagagagtgaaaagattcttttttttttttttttttttttgagacggagtctcgctctgtcgcccaggctggagtgcagtggcgggatctcggctcactgcaagttccgcctcccgggttcacgccattctcctgcctcagcctcccaagtagctgggactacaggcgcccgccactacgcccggctaattttttgtatttttagtagagacggggtttcaccgttttagccgggatggtctcgatctcctgacctcgtgatccgcccgcctcggcctcccaaagtgctgggattacaggcgtgagccactgcgcccggcccgtgaaaagattcttgtaagattccaggtgattcttagttcttttcatggtctgtatatgagaagtgtttttctacatctttctttatgatagtaatagatgtttgtaacagtatagacatttcacaggagactttagttaaatttaggaatcatgactttatcctggcaattttactttagaaatattatatgcttagagtaattcagataactcagtcctttgaaggttctctacatattactgcctttcatatttgaagatagatttggaaatgattgtcctctgggtgtaaagagtccaatatatactgctgttgtttccacacagcattgtcatttcctaccagggactctcccttttaaacttaagagttggcacggaaacattattgctcaaaagagccacccattcccgagtgtgtttgacaggtctttgtaaacaaacttcttcagccttgctgaaattagtggaaaaatctaggctctcatgtttacagttgacgtgggttttcctttcacctaaaataaccattacaagtaagatactaagtaaaaaacatactcatttctacttggtatatgaaaataatatatgtttgatgtattcagtgaaattccagttaactcataactctttgaggccatggatggagaggtggcattattagtctctacctccagtgcctcacacaattcctgggcacagaaagagacatacaattcatgttgggtcaatcaaagaatgattgatcattggcacctcctgattctatttggtggtcagagaaagtggcaggacttaagttattttacatataaacatttcttgcaaaatttggagaggatgttttgatggcttgagatcttttaatttctttgagttactttcattgtccttcccaccccttccctctctccactctgaactgcatagggcctgcctgcagtgaactactcacttcttctgactccaaggaaggccatatcatgtgttttaagtaccccataaaatttatcttcaaagtaaagcttcctttgccaagctcacaaatgatggatttttgttttccttcggcctgagggtcaaaagaatgggcacttttgtatgtacagtcttcggggccatttcctccctcctatcctactgccctctccctgtcttaggcaagaaatcacttggttccgagcagtgacctccgctgggccagacagttctgaaagcctttgtgtgttcatttccttaaagaagtggaaggtaacatgtttgaaagccggacagctgtggcctgttccaaaacatcaatgttgattgtttgtttttctggattttaacaaaggagcttttgccaggagacctttgcactcttgcttattcaaaccccaaattacaaaaatacataacaaaaataaaacagaagccagacttaaggttatcttaccaaaacaggacgtcttccttctttagattgtacaaacacatgagttccctagttaaattcaatcaatcattcctgacggattcagctaaagttttgctttaactcataccacattgtctagtccttagagcttagttctatttcctcaccttgtttacctacaaaatggtgcatctatttggaaaaaaaaaaaaaaagaagaagaatttactggttcctttttacctctgtgtattcagcaataaaaaaaaaattctctgaaatgtgtgctggagaataataagcagttttccttgggtggtcttaacagcttaacagattgctctgaaattgaaatcctcaaagatgatctgttcaaaggaggggtgtcgactttctcatcttttggagagagagagggatgcagcattagctagagacagtatgaggtcgtggtaaagaacatgaactctgaggccagttggtttggtttcaaatcatctgcctcttactagctgtggaccttggttatatcacttaacctcactgtccctcatctgtataatggtaataatagtagtacctcctccgtgctatcatgattaaataagttaatatctctaaagcactacataataagtgctgtgcaagtgtttttaaaacacatgaaaaggaaatagagatgagataatgtcagaagagattagtgttaagcccttgaagggagggggcaatttcaaatgagaagagctgatagggagtggcagagaaagcaagtaaattggggattaaatgatagactatgcatttggccatttggagttcttaagtaacttctaactattcagaatgtggctttaagcaagccaatttatctccctatcggtaaaaggtgacacttggctggctcgatattctgttatgtgtcccagccccagaaatgcacagactggtttccatttttagtggagtgctgtgagcagaagccagactgagatttcaggttggattgaggaaagatgaaagagctgacacttggtatctaagtcatttcctggcagtgagtgagaagagagagcatcgctaatggcaaagccagggctgagaggcatggggttgagttgctgtgtgaagacagtcgctcactgctgcctgaagtcttccatggtttcttctgtgatttcttcctttcccatctcaagcatttgattccccttcttactttttttctgactgttactctttcgaagttgcctgtgaaagggcctccttgtttgaaatctcttcttgggaaggaagaaagtggcatgcagcaacgtaaatagcaggtgcaaatcctccagatgagttccagccgagggagagtggtgcttgagtggctgtgctgaattcctcctcccaacttgatagcagatttttgatattacagtccatctgtgcaccattttttaatgcgtatgtttttgttttttggtttgctttattctcattttttcccttgggctctttaagtagtcttattctacaaagcagcattttttttctttttcttatttgtgcttctagtgctctgacccatgggtttttttaaatataaattcacttgcgtttagccatagccaccgagtgaagggtactcatttctgaggaacatacttattattctggcataagctatgtgaacagactgttctctacagatttgagtatctttgagaggtgctggcgacaacaatggcatttggcagcatgatgctctgttcaaacaaatattcaacttggtttatattagcgtttgtatcaggctgtggtaagcacagtattctcagatttgaacctataaagaattatggaaaaaggatggtgaggtccgcagaagtggtcatggcacttatatttttccagtttgcctttcttgatttttcttcattaaattttcattcagtgtttttatcagacaggatgtgttagatgatgctgcagtaacaaatgatacccaagtctcagttgcttaaagaaacaccattttctttattggctatgctacatatccatggagggctggccttcatgtaggccttcatgtagatgcacgttgatagatatccccctgtcaccagttacaagggaaggaaaggaaacatggtgaatcatgcacactgtcttgtgggatttggcttagaagtaatattacttctgctcatattcattggccagtcaatgaaaggcaagtcaaatggccatgcctaacttcacatggatgggcagggaaacacaatcctataatgttcttggaggaaggagaattggaaatatttggtgaacagcactaaattcctaatacagtatagacgttacgtaagtcaaataccataatagagtctaggggcacaaagatgaatggagtgtattctaattctagagaaattatattttttgggggaaatagctttatataggaatttcaaaatgatggtgatgaagctaagatgtttttaaaaccatttctgtattttattatatttatctatttattttttgagacagagtcttgctctgttgcccaagctggagtgcagtggtgcgatcttggctcaccacaatctctgcctccagaggttcaagcgattctcttgcctcagccttccgagtagctgggactacaggcacgtgccactacgcccggctaattttcgtatttttagttgagatggagtttcaccacgttggctaggatggtctcgatctcctgacctcaagatctgtctgcctcggcctcccaaagtgctgggattacaggcttgagccatcgggcaccctgcccccatctctgtattttaaaagattaggaatgtttcctttgttgtttcatttctccagtttttgtaagtatgttccaaaagttacaaatagctactaaataatcttcagaacttaaatatgatgaagaaaaattggctttacttaattttacataatgtttgggtcctttcttgaatctttatatgtgaaagacatcatttttgtggttttgccatgctttagcagtctaaaaattgaatgtgcctaaggagaataacttttttattacatgctggcttaaatctcagacagaattccattgaaagccagttggttttctgttttgttttttttttctatgtgtctttcagtgctgaaattggaaataaaccagcattatggcttcatgacggaaagtgtagcaattctgcacaatgcacaagcaagtttgtcatttaaaatagcagacatctgtcagaagttggtgctgaccttctaaactgcaactgaatgttcagactgttatttctccatcctcctcagatgcatttccagtgttgggctcacagccccatgcttcttgtctgcttcctagtgggttatgggttgtgtcctagagtctagacatgaaatgaaaaatgattatgtaatctgtttcccttcttctctgcaaaattcagaggaagggtcaaagctttgagacataccacctccccctgcttggtggaaagagcagattttgaggatctatagacatagagttggaatcttggccagccccttcttacctgtagaactttgggcagattgctttatctctttaattctcagcttccttcccagtcatatgaagagcataagaactgtttcagtggcttgttgtgagggttaagtatatggtttatataaaatgccaacagtgtctgacatgtaacaagcacccaataaatattccctattggcacagtgcttactggtttttaaagaacttcattacattttatctcatgggactacatcaaggaggtaaaaggcatctagctgaattagttttccattaactttccaagaaaataaatacagactgcattctcttggagtcacagttgacttcgcaaagatcttattttattatgatatgtgtatgttttcttctctactcacattttccctcacccatcatctgttacattacatatagactgaatcctctacactttttaagttataaatcttttcttgtgctattatgagttttgggtgattacttcagccagcaatggatgattaagggctgaggggattggtgttcatactataggagaagaaaacaaaaactttgataattttaataataatgactaacaccaattgaataatgattctgtgcctagttcctaattgaagttttcttttttctatgaaatcataattaatcttctctccactctgtaaggcagctatgactattacttgcacattgcaggtgaagaaatttaggctaggatgttaaataatttgtccaaggcagtatacttagtaagattagcactggaatttaaatccgtgattgtttgatttcaaaattgctgtttttccccactcagctctatagtacagataaatttgggtttaaaatagggaggttatattgctggctgatgcgtgttgtgtgaacactgtctgagtggattaattgtggcagctaaaaataacagggtgtattgttgactttttgtacagtctaaacttcttttctggatgactttaaaatatgagtgtgttgctgctcttgattcctaacagagaactttagagacctggaagcctgtcctttgtgtaactctttacgtataacgtcagattctgtggacaggtggcccctgatctgcatccctaacaggagggttagtactgagaagtaagggtaaagatagaagctagaaaaacaaataggctgtaccttcctgtctgaattattctctcatttttctcatccctgacaactttctcaataaattgtcctagcaagtaaatccatgggtctctatccttgttgggaatagcatcatttgggcaaagctttgccatcaatttttcatttaaaaacatttcctaaggtaaacattaaggcctgaatgacagctatagtttgagatttttactttgaattatgaggcttacttggctggacaccatttttcaatggcaacgatccttcctgttttaaaacctgattgttaaaatacaggacatatgggagatcttaaaaagatcaagttccaagtataattctttttcaagtaggcagtggagtctggtgcataatgttccaatctagtttcacggtccttttgatcaacccaaaataaaactgaacaagacagcatctctcaaagggttaataccctggaatttcacacttaacaatcggcattatgttctttgcattcttgaggaattttctcactgatgtcaaaagactttggtttgttatgcaagacagtggtccagtgactttgcatatcacattctcttaacatgagggaaatccttgcatgctaattggagaaggaaaaaagtagtgcaagtggttctttggctacagatgaattaaatgagggagggcatttagtgaaaaaacaaagcacaacaaaacccttgcaaatgagcgggcattcttttgaaatggctgcttactctagtcgttttgcgtctgtcttactgctgtgctgtgtcactgtgattccagttttgggggggaaacacttgaatgtatatatggtttgttttttatttttctgattgctttaattacctattgctgtataagaaatgactccaaacttagtggcttaaaataacaacaatttattgtttcttaagattccatgagttgactagttcaattctgttccatggggtgttggctggtccctgtgttcagttggtgccggggctgggctggaaggtccaagacatcttttctcacatgtctggtacctcagtgcttctccacgtggcctttctacctggcaggtttgggcgccctcatagcatggtggtttcagggtagttggacttcctcaggtagctggccttcaaggaaaagaaagcagaagctgttagtcttcttttttttttttttttaaacttttaaattataaagctgtcagtcttcttaaggccaagcttgaaagtggcagcatgttacttccaccatatcctgttggtcaaaggaagccctagagtcagtccagatttgagggaagtcggggaaatagaccccatttctggaagggtggagtggcatgtccctataggaggaaacgaattgatggcccaaattgtacaagtagagggaggactgagggcagaggggctcgtcttagctggtgggaacaccaagggcggaggagagttttgtcccactttctttttagggttctggacagacactgctatgtgagtaacttcatgccagcttaaaaggggtacacttccaagtgacataagaggacaaaatggtgaggtcaggtggaaggggccccagggcactcaccaaggctctctcagctcctgtgtgatggcagaaggagccagatgttctggaattcttccaagggaggtctcagaaggcagctgagttaagaggcagtgggcttaggctaggaactgggtggagaatggacccagagctggctgtggcaccactggaggccagccagtggcactctaaggccctggccaccagctgtagacatcagctacagatgtccatggaatatctagggttgtagagctagccggtttcactcccatggtcaccaggccaggcagcaacccagactagctgctttgcagcagagggcagctaggatgtagaggacaacatgtgatttgcattctccatctctcacatcaccataatggagacactcttccctctccccatacacctggttacagttggtttttggggtatttttttcctgagacagtcttgctttgtcacccaggctggagtgcaggggtgtgatcttggctcactgccacctccacctcccaagttcaggagattctcctgcctcagcctcctgagtagctgggattacaggtgcccacccccatgcccggctaacttttgtatttttagtagagccagggttttgctatgttggccaggctggtcttggactcctgacctcagatgatccgccagtcttggcctcccaaagtgctgggattacaggcgtgagccaccatacccagccctggatactgtcttgatgaacagaaatctgagtgactgagcatggtgtctaaaaagactgaacctaaaggaactgtttaatttattgcataggagtaaatatttgccagacttttctacagttgggtctccctttttccaatagtctgaataaagtcttcctatggatgttaatatcttaatccttagagcctctggctatattatcttatatggaaaatgagactttgcagatatggttaaatcaaggatcctgagatggggagattatcctaggttatctcagtggaccctatgttatcacaaaagtcctcataagagggggactggacatcagaagcagaaaaagaggagattatccaatgttatcccagtggaccctatgttaccacagaagtccttataagagggagactggatatcagaaacagaaaacggagagatgatgatggaaccaggtattggagtgatgcatttcgacgatgaagaagggaccatgagcaaaggaaaacaggtggcctctagaagctggaaagggcatggaaagcctcctgttccccgtgccgaagcctccagaaggaaggcagccctgccaacatctggacattaaatttcctacccctagaactgtaagagtcaatttgtatggttttaagccactaaacttaatgtggtaacttgttagagcagccacaggaaactaatacacccttcttgtcctaaaccagtcacttagaaacattgaagctacaatttctttgctcatttgagtgcagaataaagctaatagagttctattttattttttctcccattcattttcctagtaagatattatttctgactatttgatgagcaagaacattgaggggtaaggagtgaagttcagtaactttgcccaggttgaatggttaatgattgagcaggattaatctaagctgcagagacactgtctgggaacatcatgcaagatcagggtctcatataaaaatgtattaagtagaagtttatatacagagtaagctttcggtatctcaaaaatcttatttctgaagtcctatattgtagcaacttattgacatgatgattcctataatagaaataataaaacagttgccactacgtgactcaaattgtcccctccttattttgaagacttcactcagcttctcaagaaataaccagtgtaccatatttgttccactttcaatgatacaggcacttttcaattcatttattacttttgtaaagtttagttctaataaagctcatagagccataagaaaatctctttaaaccttgtttttctattaaaaaaatacattctgggttgtaaattaggaggccaggaattcttgttccctctttggaggtgattgtggtggtggtttgagctgtctccttgcctagatctaggtacctggactccacaactattcactgttcgcacttctccgcctgtgtagagatggcatgacatttgtctgaacatgagtatacctccagtttacctctccttgagcttttctgacttagaaaagtgagcagttgcccccaccgaagggtctggggttgcagacttacttagggtctgctcatgggtctggggcattaaaaaataatgtccatatgttggggacagcttgtattaagaataatctttgtgagccagttaatgctgtgagagattttttcctgacattgtcattgtgctatttgcagcacaagttccaacaaaacaacttttccattttatcatcgggattgtagaagcagcatgtaaagtgattaaaataatggcaccagggcaatctgtgtgacagatgctgtcaggactggagacagaatgcagaaatttccaaatttctgtgtgtactctttggtccttcccaaggagccttcgtgtgtgtttcagtccttgtggaggatgggaaactaggattttgtcagcgtctgggtatatattggaagtatggagctggttgaaaaaaaaaatttgcgaaggagatataaagcagaaaattagggtaaaaacacatggtttttgtctggtcttttgcatttcctgtgtgaaaggtgaatccttgaatctgaaaatgaaagccatctccaatgtctcctaggtaatatgtcaaatactgtcacggacctcagatccctttcattgcactctttgttatttctgaatgtgagcttgacacacaaatcttcttttaagaaggctttccagaaggcctactgtagctgtgtgcatgctttaaaataaaagtaaatccctttctcacttaaacaaaacaaaacaaaacaccaacctatttgtgtccatgaaaaatatctttgcatgtctagacagtagtgctgatcggctgccttttgtaaggaagggatacagaaaaactattattctccccagaaaccttgtaaggtcctacgtgacccaagtgacctctcactcaactagtgaaacaggagccagaagtgtgcaaggagcctgagctggagcttgatgctgatgttataaatcagccttggcattactgggctttcctgtttttagccagcagtccttggggactgttgctgattgagagtgagaaagatttctgaaccattgtaagtggtgacactgacatatcattaggcttccacccagatggcatttgtaacagatagaaaggaaactgtagtggaattaacttaaagaggaaagaattaaagcacaattttacaggcatacgtagcatgggaaggatccaaagggaacttttatttgctgtctgcttttgctagatactgtgcttggtgtgttgtaggtggacttcaaaataatgagaaaaggtttttgtttttcatttacagagtggccaggagggccctatgcctgctagttgaagttatctgtgtttacctctctgtttcatgtaaattcaattttttccctcttcttctcctgggcatcttcttttttgttttttttcttttggtttgtttatgactgtaagtcattaaagcagttcccaaaaactgttcttaggtctttagctgttgttggatgcagttgagaattttttgctttcacaatggcccaaagtaaattgtcacatgtggtttaagtctggaccctgcagtgaccactggattatcatatccatatccattccatgatgcactgaatttgttactaaaatatcttctacctggaatatgagaaagtgctgggggcattcattgttttattgcaggatagctgttttccccaatcagctacctttttttttctacatagctgtggaacaaaccacatccaaagcatattcaagtgtgtgattgaccctcatattgaacagatattaaaattgcccatttcatggcatgaggaagctgctcattgaacagagatgtaccctccatcatccatatctgcaaagatgagagaatggaggttcagagaagtaaaggaacttgttcaggccacatcgtcaggtgagtagtggagcaaagactcatacctggtcctgtctgattacagtgcttgtgccttttaatttttcttttcttttctttttttttttttgagacagagtcttgctctgttgcccaggctggacataatctcggctcactgcagcctccatttcccaggttcaagcaattctcctgcctcagcctcccgccacgacacctggctaatttttgtatttttagtagagacagggtttcactgtgttggccaggctgatcttgaactcctggcctcaagcgatctacccgcctcggcctcccaaagtgctgggattaccagcgtgagccactgcgcctggctggcttgtgcctttttattacagagcttttcaaacttctgcagtgaaggactattttttttttttgttttgcttttgttttttaaatttccaatccgctgtaatacagggctgactgcacaggatcagcatgctgcttgcatcacatgcacctcgcccaggccagttggccaacacctaaacagatttacatcttgctcagcaagatgagtcctgccatcacatggcttggatgtggtggcgatggccagactgctgtaaatgtggattatcaatcctgtaatgtacaatgccatggaccagcagtgatcaattcacagatcatgcttgaaataatgctgctttggtttaagggtgaggggagcatctgtcagggaaaagccagactcctttgactaaagagaagcattgggagtgcagttgggaggctaggaatagaatatgtggaagatgtacccttcagcgtgcagatggtgtggttttcttattctctccaggacaaacttgaattccagcaagtcatgttctgattcagtacatgcagatttttgttctgaagtcagatggggacataattgcagtgtccactataggaaaaacaccaagtgatttctaatacctacaacaagcacaatttgcctggtagaaaggggctcaaaaaggggagggcaggccagcgccgtggctcatgcctgtaatcccactttggaaggccaaggtgcatggatcgcttgagcccaggagtttgagaccagcctgggcaacatggtgaaacccccatctctataaaaaatacaggaattagctgggtgtggtggtgtgtgcctgttgtcccagctcaggaagctgaagttggaggattgtgtgagccctggaggtcaaggctgcagtgagttgtgattgtgccattgcactgcagcctggatgacagagcaagaccctgtctcattaaaaaaaaaagaattaaaaaatttcttaaaaaagtgggctgggtgcagtgtgtcacgcttggaatcccagcactttgggaggctgaggtgggcagatcacgaggtcaggagttagagaacagcctggccaacatggtgaaacccagtctctactaaagatacaaaaaatgaggcgggcatggtaatgtgcccctatcatccctgctgctctggaggctgaggcaggagaatcacttgaacccgggaggcagaggttgcagtgagccgagatcatgccattgtagtccagcctgggcgacagggcaaaactccatctcaaaaaaaagaaaaaacaaaaaggaggagggcaacatccttgcatgagtttctccagaaaactttattaattcacttggtgatttgttctgcttccttactgaacatctcctgtacactaggcattttgcttgatgcttcatgattaaggtagtattcctatactgtgtaatttacagctgctggaggaaaggaagaagtaacaagaagacattttaaaaattattaaataaacttgagcattaattttattagtttcccctctataattaacaagtttaacaaaaatactgtttaatgcttagttatatcttttctaggtgattaaatagggtctttgtagtaattttatttttaagggctttaatcaggaaactagtatctaactaaaacaatgtttctatgagaaaatcacattctacagaaatatttttgacttcaatgctttcctcaagaataaaacctgtcagaagtgtgaatactgcctgtacttagcagagcaatttgttatgtgaaccagtattggtaaatgtccccaaatggtaccattgggtttctttggcctgagatattataataagctggaattttatgttctataaaatacagaaaaaataccatggtctattatttatttatttctttgtttgagacagagtctcactctggctcccaggctggagtgcagtggcgcaatcttggcttactgcaacctccacctcccaggtttaagtgattctcctgcctcagcctcccaagtaaccaggactacaggtgcacaccaccgcgcccggctaatttttgtatttttagtagaggtggggttttgccatgttggccaacctggtctcgaactcctgacctcaggtgatccacctgcctctgcctctccaaagtgctgggattataggtataagccaccgcacctggcccatagtctactattgataatatagcagacctatttctatggtgactaaatataacagaaattaatgatgttctcaaaagcttttaaaatgatactgaatatgaatatgtggcagaataagaagtttggtcttaagtctttgattctgattgttcacagattcttttccttcatgtttgattttacttctgtttcatggtatggagatctctttcccttggtattgcatgtgtaggtatgaatgacatgaacccctcttcccaacactttgctgtgacaagtcaaaaatgccatgtattgctagggatttttaattcagcttctgtcttgagtagaaatgaatttactagaagaagatgtagaaatcttagttttatagtaatcaatgaaaaatgaaatttgcttatatttcaatgaaaaatgaaaaccaaacagcttctttataatttaaatctattagcaatgttttaagcaaagatctaattaatgtatttttaaaattattgctatttgtcttagttcccttggccaatcctctttcttattgtcccatttctgagtttctgtaaagaaaggcttaaaaacttagggcattctctctcttgagtcggtcatttttttttcactttggtaaagacaccattgtgccttggttttaatatgaggaaaaatgaaggtgggagtggaatttgcattaaatatttggaatttttcttcctccccaccctcaacgtctaaaatatgcatgggatttggaaaacaaattagaaacaggatctttcacagatattttaaaaatgcatttctaaatggtggggagttgtgatttctgaatagtgccatttcatttaggagcttaggttacaaagttgtgtctaatactctttttctttttcttggtttttattttaacttcttaaagattgaaagtctttttaagaagttaatatgaaatatctactttgctaatataaagtagtttgctagtataaactaataatggtataagcaatattaattttataggtttttgctgtcgtcgtttgtttttgatgtgggatatctgctaaggaaatagagagtaattagactcagaaatgattttgcttctttgtctctctctgtccctaaactcttgggttagtgggaacatggagaccacaaaagctgtgattctttctcttagacattaattttaaaatagcctgggtgtggtagctcatgcctgtaatcccagcaatttgggaggccgaggtgggcagatcaagaccagtctgggcaacatggcgaaactgcatctctacagaaaatacaaaaattagccaggtgtggtggtatgcacctgtagtttcagctacttgggaggctgatgcgagaggatcacttgagcctgggaggttgaggctgcagtgagccatgattatgttactgccttccagcctgggcaacagagccagaccctgtctcaaaaatacataaataaaaataaaaataaaaataaataaaaaaggacagatagactggaacaaaccatcaaagatgcattttacgaaaaacacaagtttggccacttagcatcagtgtctattcttgcccacttttgtatacatgctttgcatattcccaagcacacacatggctcaaatatgtattcatggagcaaatggatgaaggaattaattgggtgtataaccaactagttaaccaactagctgatttcatgatagttgagaactcatctgtgtgggttaccattgtgggttgaaatcacctgcatttttcaaacaggtactctctctccattttggttgactgtgttgacaaagaaaaagactctgtaacactcagaaatctaaatatagcttcacacagatgcacacttgttataatgatgcagtatggaaattaactatggattgaattttaattatttaaactgcacacatctcctaccccttcctccctctattgtatcacatgtaattacattattatacatcagtcatttaaccagggtaaacaataattgctggaaaactaagatttttaatatgaagaaaggaattgctaagtaaatgaaagggaaacatacaaatgtactgtgtgattcttttgtgtagctgtttgtttagcaattcaggaagtgacttaaactttgcctgccaatattagatgctagatttttatcaaaggaaaggtcctatcatttttcatgtgtgtttagttagagatttgtttaaatggaaacataagctagcaagcaacagtttcacttttggggaatgatttccctcataaaagcttcatgtcttatgctccaaggtaaagagaaaaaaaaatcatattggatgttttttttctttttttttttttttttttttttttttttgagacggagtctcgctctgtcgcccaggccggactgcggactgcagtggcgcaatctggatgttttttttctttctgctctgggaagtgcatcaaatgtaaccaacacagtgaattcagaccacctgtgagattccaaattgcttttcctgaatcgttgttgaattaaataacaacatttgattatggtacttaaagcaaatcaaggaatattcagatgaatcagtggataaacacatttaatagtagtatggactttgctcttattgcagatggattattatccaatgaaaccattcttctttcatgctgtaaagctttccagatttcaggaagccagggcagctgtatttttttaaaccttcacatgtgatccaaaagtaccatttcctaggagaaacgaagatctgttaatttacagtatttgtaagcaatggctaaactcttttctgtaaacatcagaaatacacctggtgaaggaaagctcttctgccagataaaatggaatgttctcagttaaccaagggagcagctcggatgagagaggcccatggaacaagtgctgctgagcatctgattccagcctgtgaaggatgtgagggagtttgccttccctcagggctagagaactattcatataagcaactcagcaatttctgtctatattgctgactttgtcttgatgtcttgaagaatatgctcacttaaaactcgtagactcaaggaaaggcaagctggctagatttaaataaaactgaatcatagaagaggctacatctgtcagagaaaactctgtaatcatggacagtgcagatattcctatctggataggtattgtccgtgggactgaagatagctgaaatgtgtgcaagagatggctcagagattgaagagtgcttccaatttctgtgagtctgaatagttctaaagatgtagagactcatttggtttgagtttatgttctggcaggtattctttgtataaaaattctgtttttactactcctaaacgactttttggtgacttttcagtcatattacatatgactgaaatatatgtatgtgtatgtgtgtgagtgtgtgtgtatatatatacacacacacacacacacacacacacacacacacacacacatatatagagtgcagggcatagcataagtttattaatgtttcattgagaaggtaagactgaaatacaattacagaatattgaggaaaatctatattaatatatgagtttgaccttaagggtaggtcagtggaccttgaactatttggttggcgtcaggccgtgcctgtggtgtctcttcattggccaacacaatggcgtctttgtctgggaatctctacctctcattagggtggtcaacatatcacagtggtctttcccttcccaaataactgtgagaacaaaagtgccaatacaagcataagcccttgccaagtacaacaacatgaggttccatcagccctaaagaggggcaacctaagttggtcatcacagcaatgggattttcagtcttgctcaacattggggatttgaatagctcttaggataatctcttctctagtggttaaggatatagtccccataaaagaaatctgcttatgggcaatattttgccgaaatctgaccatccactgtctgatgtgatggccaggctaccagactgaggttaaagagctgagttatttactgacaaagtcaccaacttcttctagctcagcatcttgctcaataaccactgtgtgcttttgtaggcacatgaagagaatattcaacaacattttcccattctttttttttttttttttttgagacacccaggctggagtgcagtggcgcaatcttggctcactgcaacctccacctcccaggttcaagcaattctcctgcctcagcctcccgagtagctggaactacaggtgcacaccgccacgcctggctaatttttatatttttagtagaaacagagtttcaccatgttggccaggatggtcttgatctcctgacctcgtgatccacctgcctcagcctcccaaagtgctgggattacaggcgtgagccacagtgcacggcccccattctttattaaacgtgtaggaagcctatttatatctcaaacctctgattgacagcagttgattgattgtccatgaaaggtggacttttaccattctatgttcccaagctttacttaggcagaaagccattgccatcttctgagacgaacccctgtaatgtaaccataaagcaagaaggatcataggcacctgtggaattgtcctcaaattttttggcaatgaaaattgcaactgaagcactgctaatattttcaagaaaaacagtaaaatggattgttacaattagttcctccaattaggtattcaagaaaagcatagaagtatgtgaaggtttccttatctgtttatccagtgacctgtatctttccacgatactttcaaatggaatttatttagcctaaaaatagaaattaattttgcactgatggcctgagattagagtttctttgcattctggagatgagggtagctactgacctttctatcttgctttattatctgttggtcttggcagtacctttctcttccaggatgcattcccagaatggttcagtgaaacaaatgctctttggaggactttggctctttgtggctgagataaatatatatcaacttaaagtgggttttattttcctctgtgaatgagttcctagagaattgaaattgtggaaagaactaaaagctcaaatataacagaacgaagtttccctaaaggattacggtctgaagcctcagtacattgggtaattttgttaaaataggttcttcttgtcaaagggtttgagggttgctgtcagtctattttcaaaactgaagatgaggaggatgattgtcaactgcaggttcaattggaacatcgtggggagaaaaatctctattctgctagtcgttggtttttgaagcacagatggggcctgtgagatttgggtggcatgatgaggggaggggagtaaggggcaatgcagcagggtataggggatttagactcaccttcctagtcctgttgcagttttgaaacctctgagtctattagtgtccgacaaaagtgtttgttaaaatagatcaaagactagatttctaaccattagggaagggaaagacattctcagagattcacaaatatacgtagttaatggaaccataacttttagaagtcagtgttcacaggacagatgggaatagctggaatgaagtgagctttgaatgctgattgctttattttatactagctaatgagtgaatgtgccacacatcctctaacctttctggaatggtgaacaaatggatagatgtgctgagtaagtgttggaagacaactacatgaacccttaggcaactaggaggaatttaaagaaataaaccatgtgtttacaattaaactaggaaaagcctgtatataaatccaattggtaacacattatataaagataaatgataaaagtccttaatatttttcatgatctttcaaagtttctttaaaagtggcaagtggcctcagaaatttgaattatcatgaaaggaaaaggaagaatgacttaaggatgtgtatgtgtgtgattctgagttaaagattctggtatagatcagtgtcgtggagacattagagacaaatttgaaggttaaatttattcaatgggccaggtgtggtggctcatgcctgtctgtaactcctgcactttgggaggctgaggcaggcagatcacttgagcccaggagtttgagaccaacccgggcaacatggtgaaaccctgtctctactaaaaatataaaaaattagctgggcatggtggcatgtgcctgtagtcctagttactcaggaggctgacgtgggaaaatcgcctgagcccaggagcttgaggctgcagtgagctgagatggccactaactgtaccactccagcctgagtgatagagcgagaccctgtctcaacaacaaacaaacagcgctcccaaaacccaacaacaaataaatttattcattgcatttcaagaggagcgagtgttttgagaaaagacaaggacttttggtaagttgggttaaatactgatatctgcttctttaacaggatcactgttcttgtctatatctggaaagaagacaaaccttgggcagcaaaatgctgtttttattattaatgcagtgatgtcaatccaaactagatgactgtgattcatggaatcttcaaggaaaaccaaatattcttttttaataaagtaatggagctgggaattgcacatctgctcttaaaaatctgtttttcgtaatacagaacatatgttaatcgtcacatcttttattaaactgaaggaaaattcttgttgagtagattaattctggatcctgaaaatgcgggaccatggagacgagaatatcgagacaaatgtctgtctgtcttaccaacttacctctagaacagtgattttcacactgctggatgtgaccttcacgagggtaatgaaatcaagctagtgggttgggagtagcatttttttttcgtttttgagacagggtctccctctgtctcccagtctggagtgcagtggcgcgatttccgctgactgcaacctctgcctcctgggttcaagtgattctcctgcatcagcctgcctagtagctgggattacaggcatgcaccaccacgcctggctaatttttgtgtttttagtagaaacatggttttgccatgttggccaggctggtctcaaactcctgacctcaggtgatctgcctgccttggcctcccaaagtgctgggattataggagtgagccaccatgcccagcctgggagtaacactttaaaaaaatgaaatggagtagaaaatgcagagtagaatgtaggagcttttgggagcttttgcattattgctctctcttgtgtgtctacacagaggtgtctgcagtcatgatgtaggaggtaactttcctgtatttctcctagagcttcagctttaggttcgctttaggttggtgggaccagcaaaatcccaccccaaattggagaggtctggctgactggttgaggctagggtgatgtctgattgagaaggctcgaagactcaaccacagcttttgagtctctgattctgcagttacattatacctgcaggttcagggcctgagcttgtctgtttcctcacagatatttatcacagtgctctctccttggcctgcactgacccaagaatcagaagcagtatgtcagtgcgtaaggaagcacaattcattaattttttttttttaaagatttttttggtaacagttttattgagaaataattcatataacacacattttatcaatttaaaatatgcaaatcatgcttttcagtatattcacagagctgtgcaagcatcacccatatcaattttggattatttttatgactttgaaaggagaccttgtaccctttagttatcatttcccaacctttcctttcttgggctgaggctgtagcgtcagcggacacctcgagagaaaagatgaactttggcatctgtaggctgatacggtggtctccaaactttctttatttattaaatattcagtaaaaaagcttttgagcatgtacccccaatttacgtagatggaaatacatttgttgacttctatttcaggctttaaaaaaagaaaataaaacatttgtaaatgatgtatgccactgtactgatacagtattacattatcaaacacacacagagttcagcacttagtaaaaaaaaaaagctggtattttctccacacgcccctgtgactcagcctctgtgggcctccctcccgttttgatggccttcagttagcgtatacaggcccagtttggtctgggctcagctgacccctggacctctctctctcatcccctggcacccttccaacccactccttgctctctggccttgcagaactccaggcagtgctcccagatgctggcttttctctcccgatgacaccccactatcttgactttccctccacgtggaatgttctccctgtccccgtctttctggcgaacttggtctaattcacacagcatatgcccaggtttacctcttctgctagttttccttactctctgaagcccagctagatgggcctacctccttttccccttaacagctatacctgtttattgtaacaatatatttatttgtttgtttcccattttaggccccagggattggacttgtaccttgcttacattttctccccaccttctctctctcttactttcttattacagcagtgttgataagtatattctcccttatacatgaatctttgcactttcccgcatgtcttcctagggatagattcctagaatgtcgatgccactttttggtcatagttaaaaaaatccagaaaaatggattgagaccagattgtgaagtaacttgaacctcagatctccaaacattaaagcttattgattgggcactaatcatatgagtttgctagagctgctgtaacaaactaccaccaagtgggtggctggaacaacaggatttatcatctcagcagttctggaggctggaagtccaaaagcagagtgttggcagggttgatgtcttctgagggctgtggggaaggatctgtgccaggcttcttggccttcttcaggttcacctgacattctccccatatgcctgcctgtgtacccagattccccctttatgatggcaccagtcacattggattagaggcccaccttattccagtgtgacctcattgtagcttaacaaattacatctgtaatgaccccatttccagataaggtcacattctgaaggtactgggggttacgacttcatatgagtttgcagagtggcgcacaattcagtccataacatttgattgacacacaattaaagttatatattattagggagatttgatacacttataatgtcaaatcttcctagttaggaacaagatatatttctctttttatttaagatttatttatatttatttcatcaagtcaattttatagatttattgggtttggggccttagaaagttagaatatttgtaaaatgggatcagacctggaagaatatgggtaaatcacattagggaaggtaagagaatggagtggggtcactggcatatagttggcacttcatgagcgtctgtggagtaaatttgctgcatgagtagagggaatcaaagttaaagaacatttaatttagcaacgtaaaagttgtaggggatgatggccaggtgtggtggctcacacctgtaatcccagcactttgggaggctgaggcgggcggatcacttgaggtcaggagttcgcctggtcaatgtggtgaaatcccgtctctactgaaaatacaaaaattagctgggcatggtggcgagcaactgtagtcccagctactcaggaggctgaggcaggagaattgtttgaacccggtaggcagaggttgcagtgagctgagatcacaccacttcactctaacctgggccatagagcaagactctctctctctcaaaaaaaaaaaaaaaaaaaaaaaaagttgtaggggatgttgctgtacagtttgggtacttacatacttgaatttgtctaagattgtcctttatcaggacagattgagttctcaatttgataattccctttgtgtatatgggtcatcatagaggaagtgtagaagctgaaatactattatgagaaaagactgcataaaataaactcattaccaccaaggtctccttttccttctttagtctttagaaatacagatgattgaaaatttacattacatggaaaaaataagaaacaccctaaaagggtaattattttatttttatttatttattttttgagatggagtttcactcttggtgcccaggctggagtgcaatggcacgatcttggctcaccgcaacctccgcctcccgggttcaagctattctcctgcctcagcctcccgagtagctgagattacagggatgtgccaccacgcctggctaatttttttttttttttgtatttttggtagagacaggttttctccatgttggtcaggctgatctcaaactcctgacctcaggtaatctgcctgcctcggcctcccaaagtgctgggattacaggcatgagccaccgtgcccggcccgaaagggtaattattttaaaacacttttatttttatggtcgaaagaaggctcacagatcccccgtcctgctatattctgttgcatttccaactcttgagagtctttcccacccccgggacctctcctctctcccttctcccccatggagtgctggttcaggaatatttgaggattggcctattgtgcaaacactcaacattgcgtctttcatctcaaatcctacagctgaaagcagaaacattttaaatttgaaagaatgggaaacctttgcaattcacagatttgcagttcctggtttcaaacacttgccttgatgtttgttactttagttctcagttaaaacctctaccttcggggtagcactgtatgttcaattattgcattctttcctttcctttcgtcttttttattctgcacaaaatttcatccctttagctaagctcccacctgccccatcttcttaccttttttccagatgtctccatgctgggaagcctctgccagttggacttgtttctcaggggaggcttcattcaccactttgcctcctcataagccctaggcacgctttctggataaactctttcttcttttcttctcaggatcaaacaacttagtccccgcttggctcttcccctaggctccagctctagtctgtagagcctctccccactgccctccagtatcatattgaaagaactgacaaaaaggcaaaagcatgtttttgctactatggcaaccatgcccagccacatcttctctcctttttgaagttccttccttattttatttatgtaaatttatcaaataaagctgagcttcatgtttttaactgtttccagccctcatttgaagacttggccttatttcctttcataagccttcattatagctgtttggtacatggatttcttcatcacggatacctagaatattttccctgccaatggcccctagagcacttcattgtctctggatgtacaagtccctgtgtgagaggtggtcagtcgcttttcaaagtgattatgccaacttatccttctaccagtgctatatttcagtttcagttccctgcatcctcatcaacactgggctttgttgtattttttgataattgcctttatgatattctcctagctccctgaactttgtcttctcatcatacttgtttaatgcccttgccagtctgtagactctaagaggcagggatagtgcctgtttgttcaccattccactctcaggagttcctgaaatccaacacctccttccttcttctgcaccgcaaggccagtttcacatgccaaatcttctgcaaagccttcctcaatccctcaaaatcagatggctcttccttttttggggtcctctgttgttaatagcagtttttgtgcctttttaatattcaccatgtcttatatctaaatgtgtacttttctgttgccctcaatagattagctggttcttgagggtggagaagatcttcctcatctttgcagcacccacggtaccggtgccatgtatgttttaggtgcttgataaatatttgagtgaatacttcagtgcctgctgtgttctgggaaatcattcacacccttcttacttgatgatactcagtgctgttgctgacacaaaggatatgtacctaacgtaggttgtttatcggtggccaggtggtgctctagaaggactgcagcaaacaagaggacttttcaccccacacctgccccagtgctgggattgtccaacctcttcatctttgtcagtgggttagggaaaaaatggtaattatgagataccgtatatatagatacacacacacatatacagttggcccttgaacaatgcagggattatgggcactgaaccccacctagtcaaaaatctgtgtataactgttgactctgctcaaacttaactgctaatagcccactattgaccagaagccttactgataacatagtcagttaacatatattttgtatgttatgtgtattatatactgtattcttacaataaagtaagctaaagaaaagaaaatgttctttagaaaatcataaggaagaggaaatatatttactatccattaagtggaagtggatcatcataaagtctttatcctcattgccttcactttcagcaggctgaggaggaagaggaggagttggtcttgttgtttcagggatggcagaggcggaagaaaattgacatgtagctggactcgtgaagttcaaacctgtgttattcaagggtcaactgcatgtatgtattgattttgtgagatttctgtttatatcctttgctcttttctcttttgggatatttgtcttgcttgtataacctcttcctacattaaaggtattaatactctctcatgtcactcacttatttgttatctaaagcttgtttcttaggatgaatctccagcctgagtgcctccatttatctcatttctctgaagggaacagtctttctttttccacgcttctgttcgttttccatctgcctcccctcttctacccttctctccttgccccgcctcctccaacactcttactctggtcaacaccaagtcatccttcctatctaagtttaaatatcactgctttggagaagcctatctggtcctcccctcctacttcatgtcaatcaatctccctgtgccctgttattctctttcaatgccccccaccctcaccacattctctcccgtaagtgccttcatgctcccttcatgaccctcaccatcattagcagttacatgcacatgtaatgtttttatccactgctacaatgtaaatctcttccaggactgggataaaatctggtaaataagggaatgcgtaaattaaacagccaagtgattctctttgatcactgttttattaaactaaaatgatttctgtttcattagttggtaaagaaattgtttaaagacttccacttgcactctgaaaaaaattttatgtttgctaatggaaattaataaaaatggagtgtttttcaaatgggtggatgatgagggggagagagagagagagagagagagggagagagagagaatgtgcatctgggagctaaactactgcatatttgagagtaggtgtggccagctgttcgttctgtgctggaggatgccgcacccctcctggtgtgtttccccaagctctgggagaaatctgtagcattcaaacagtcccctgagtatgtgtcaaagtagtgtatctagtggcagtgcacatttcacagctattgctaaaagataaagcagagacgcaagctatgcagggcacgtcaacattcacagcaagctattttctagaaagcacttgtgaatctgatctgattattaggctgttttcaatgcatggtaggtatggtttaagggcaatccaatgctcagtggtgagaagatgagagatcgaaatcctgaccttctctgattctgcattaaatgctttgatggcacagaaaatgtatacctgagagttttatagctgtgcttgtatgcgtacatgtgtgtgtgtgtgtgtgtgtgtgtgtgtgtgtgtgtgtttgtgtggtcaaatttcatgaagacatgcttctttgactgattagttggggttattgacatgaataccatagatacagtcataaaatgtactgtatttctctatgggtttgagtattataaatatttatgtgtagttgattctctagaatgcaacttttccagattaaaaggaaaacaatagcagatcattctgaaatgaagaaagggaggctgctatcaattatagtgtttaaaagtatggctttagataaaaggatgatttgttatttaatgtatcaaacaatattgtgagcaaattctggttgaccacatctgggtgtgttccccttaactctaaaaggagaggggtgagccaggagtgattagtttggaaacagtccaggggcagagagggtggggctggattgtatggagtggggagaaacactgctcagctgggtttttacaagtcagaatgggtatttgaagaggacgctgctttcatcctgctgggtgcaaggtcagctgcagatgctctttcattgtttctttctaatcagcttctaagaatgtggcttaaacgctcagctatttccaggtggttggcatcatttattgagttgtctgctagagttatttcatacgctgcctaaaatgactcaaaaaacaaaaaaacaaaaaacaaaaaaacccaaataaaacagctgtatggcaaacatgctgatgaggacctctgcatttagttgcttcgactcagcgcacaagttaatttaatgttttgagtttggtgacttattcaaatcctaaattgttactgctgtagttagtctgtaatgtcaagagtcttgttaatcatggtagttacattaacctgttgttaaagaaagactcttcgacctcagacaagatatccaatggtggtaccttctgacttgatactaacacataagaaatctcttgttcctttaaaatgactagtaaaattacttacctggttagtgaatttgcatttcaacattcttttatttccaattttatttaactcctggatgtgagacacacttttttttgtttgtttgttttgtttgtttgtttttgcctgcatgagttcttgtaataccagtgaaacagctggatcagtatctttgatggcaatagtgagtttgtcagtgagacgatttggcctactgaggttgtaaaacttacgactccatagctgcatgagctttaatggccattttccagaaacatggctaggtttatatttctcacacagcttaaattttaggtttatgtcaatttttgtttttggcctcaccctggatagttttatttgcatctttgatgcaaattttctcatttttcttattatgtttgattgttttgggtgtgtgcgtgtgcatgtgtgtgatgttttcatgcccaaaagagcaattgcaaattccctgggtacaccaagtaatatgccttgtcttaagcaactaatcagacaaaattgcttttttatcagactcatctagattgaaaacaatactgtatgcccttgaccatcttctttgaccagtgttgcagttttgacagagacgctaaggcagagggagggaggagatgctgcctttatcaatgggctgctgctttataacaaaccatctgctctagttattaggttggtgcaaaataattgtgctttttagcattactttcaatggcaaaacagtggctgaaaacaatgacagcatttgtttcactcacagaccagcaatttggtcagagttctgcagggctagcttgtctgttccactcactgtcagctgggtcagctcagaggtttggggctggaatcatctgaagcttgtttgctcacatgtctggtggtcgatgctacaggtcagctgagactttagcgagactgtcaaccaccataccgacatgtggcctctccatgtggcccgggctccctcacagtatgggggctgagtttcaaggtgtgaagacaatattctcttcctatgtaagagcagcagtctctgtcacagaggctaagaccatcagagcttgagggcacaaagggaaattctacttggaacctggcatatcaaacctgaaaattcagaacttatactttggttagatacagagaaaatgcacgtgtgctctctacagtagatgtaacaaatctcttgagtttattagatacatagctctcaatttagacaagttttctgaaatatataccttaatttctcaattggcaattaatttcatcttgctttcacagtcttactgacattattctgcttgtaataaatttgattatcttgttgaataggtatagacagtttattttctggaggcctctagaaagagaccttgaggagaattatggattgatatttttatataacgtagggaaattatgtggattttaactgggtccattataccattggcttgagaggtgatgtgatattaataagaactaacattttttgagcattttttctgtcctaggcactgttgtaagtactttacataaattgctcatttaatcctcccaatagtactgaagcaagtagttttattatttttattttataagtgaaaaaacagtggcccagggaggctaagtagcttagcccaaatcatagagtcactcagtgctggggctgagttagaacgtaggcagtgtgcagtttggctctggaggccacatccctaacgaaggtgaaggtagactttggacaaagccatggcctttgactttcatttcttttaagaaatcacatgatgctgcatttgtgaacagttatgcaaatccattcagaaaacatttgcaaatcatctgactggagatttaaaaaaaatccttgaaatagcatctttgccttcaaagactttgttatttagtaaaggtattaaaataagaacataactagactataaggcaaataatggataaatagatgaggaactacgaaatgggaaacctcagggaagggcaagaaagagaaagatattttgaaaataggaggcaattaataagtatgttgataagatgactaaaacagtataattggattgtttgtaacacaaagaaaggataaatgcttgagatgatggaccccatttaccctgatgtaattattatgcatcgtatgcttgtatcaaaacttcttatgtacctcatacacctgctatgtacccacaaaatttttaaaaaaatggatgcatagtatctcactcgatgaaaggaagaacttgtaacaagccaatctccttctttttgcacattaatcttgcttccaatttatttgctactacaaaatgattaaaatgagtgacttgtaaaaaaaccaaataaatatgttgaaattaaatcaaagtttgaacagatcttgagaggtacctagtaattgaataggggtggaataatactaatcacatatgtgcaggaaacagcacatagttcagtttgggtttgggcaaggagagagtaggagccaaggctggaaaggtgagttaaagatggattgtgggccaggcgtggtggctcatgcctgtaatgccagcactttgggaggcagaggcggccaatcacgaggtcaagagatcaagaccatcctggccaacatggtgaaaccccgtctctactaaaaatacaaaaattagctgggcgtggtggcatgcacctgtaatcccagctactcaggaggctgaggcaggagaatggcgtgaacctggggggcggaggttgcagtaagctgagattgtgccactgcactccagcctggtgacagaatgagactctgtcaccaaaaaaaaaaaaaaaaaaaaaatagattgtgagtcctttcttgaatatcaggctaaggaagctgaactctttcctgagacaatgggaaggaactgacagtgtttaaatagtgtacttgagtggaatgactttgcatgaacttatatgaacttttgaggcatcctgagtcatttagttgctgttcaacctgctgaagttgctctctaagcctcattatattcagttataaaatgggaaaaataatattgatttcatagagttcttataaggaactaggatatgcaaaactgccaataacatgcttggcactgtacaagttatgatttctgagatacttttgtatcatttactatttggaagatgaacatgctgattatggctgagtttcatggcagtaattacaaggataaagagcttaaagaggaaaatttagttaggatggtgtattagtgttcagtaaggaaaagaaaaatcattttaggtatttctttgcctccctccttccttccttccctccctccctctgtcccttccttccttcttttttgacagggtcttgctctgtcacccaggctggagtacagcagcttcaacatggctcattgcagcctcgacctcctgggcttaagtaattctcccacctcagcctcccaagtagctgagaccacaggtgtgtgccaatgcatccaaataatatttttaattttctgtaaagacgaggtctcaccctgttgccccagctggtcttgaacttctgggctcaagcagtcctcctgcctcagcctcccaaagggttgggattataggtgtgagccactgtgcacagcccattttaggtattttaatggagggaatttaacagagggaattaggtatgtggatggtataagggctaagaactaaacaggaggcagggaagcaacccagagattaacaatagcaagaagctaccactaactactcctagggctgaagggacttagggaggatatttttacctcagcccagagacaggggctgctaagtgggagctagaaccatgacgaagcttgcagtaagagctgcaatgtggaggaaggtgctgaccagggaaagctagagcatggaggagaaatgaccattgctagagatgccacctgaggcgaagatagggaagggaagatttcctgccttttccacacctcctgccccagtcttcgcccaagtctctcactgatggatgaatatcagtgagactttcttacctggaagccgactgtcaagggagcctgggaaatttaagttccctttgatataaagcagagagggggtgtgggcagtaggatatggatcttagagtcaacagacagaggatcggcacagatagaattctaattgactataaaaatctgcacagtcaatatggtagccactagtcaggtgtgactatttaactttaaattgaaatagttgaattaaaaattcagtttctcagtgcactagctgtattacaaatactcaatattcacatgtgactagtggctaccatattgcatagcgcagatgtagaatattttgatcgttgatcatgacatgctacgtgagccccaggtttgctggaacatccttcacctatattacacgttggccttggtctgtagaatgaggtgatgcataggtaaatttgttccactatagtaatcatctatatatatatatatatatatcttataatatcatgttatagatcttaaatatacacaaaaagattttttttaagttgtttgtcagttttaagtagagatttaggtgtgttggttatacgattgattctcagtgcttttcagtatttttctaattactcaaagtaaaaatataaataatttttaaaggcataaaagcccgaaagagccacctgctttaatcatgagttcctctgctaaccgtcagccctctcttggttcatttggtgccattatgagtggttgagtagctgtgtccctttggcttttcctcttatagaaaagccttttatttcagtgggtgtagttgacggatgttcagagccagagcgccatgcatgctggcaaggaaatgcctgctctgatgagcttcctgctgtcctcagttcccctgactgtggcaggtgctgcacattggcccattggaaattgcagttgtttttaatatttttttaaaacaaatgatctccgactggctctgttgctcctaatttcctttatttgttgaacactcaagatgcaataatctggtttgtttatagttttgtggaaataggaataatgaacatttatgtagtggttatcctatgctagtccttcttctaaacaccagcacttcctaagcacctattaatttgttgaatcttcagagaaacattctgaggtagatactgttgttaccttcaatttcaaatgagcaaacggaggcagagagtgttttagtatgacttgctcatggctaggaggcagctgaacagggtttcataggctgcagtctggctgcagaatccatgccgttggccatgcttctctcactcgagtcctagaatgctggatgcagtttgtttgggcttatttcttcgattgcttaaaaacgactaaagaggttttgcctcatttgatggatgttctattgtgagttgcacactttctattgtcttttactttaaaaaagaagaagataaaaaacataaaattatagatggtttttgagaagctgagggtccgtggtcccactgggctgtttgatacctaattttggcctcaaatctctagagcacgagtacagtgttagcttactgataactcccttaggacatctgtgacaaactgccacaaaaataataaaaaagaagcagggtttactggggttgtgttgagggccagtgcctgatttctgttaggttcttgaaagcttggcagtttcctgatggctagaaggccttaaaatttttttgaggatttagaattgtgaaggccatcagcaaaacatgaatccaagtggcatttctccctcacatgttgtccctttgctttgcatggaaatcattaccttagtttaaaaacataaaagagaaaaatgctcagacctaagtaagagcgtaatgaaatgagcatgtgcatcccacagcccttcatcagggcctcacccatgattgattgttctgcaggactatctaaatcagtagcatgtttttggacagcttgcagaagaccaacctatttagcattttggccagtgttgccaaaggggctgctgcttgaagtctgcaaagttctctttgtatgataaataattataaagggaacggtctacttgaacatctggctgatggaaagactgacttgaaatcaagtgctgaactttgagtgcatccagccccagcatctggtgtggggatacgatggatttgggagggggcagtatgtttgacatctgtgtattggtcctagaatgttcttttcaagttgtttgtgctggtcccagttgacttgtatcctgtaggaagtaaaaaggcaactgcaaaaaggattaattagattccatctctctgggagaaaaatctttattggtaacttacagtttgagatgagagttttcattggtaatgtaacttcttatgggtttgatttcctccttgaatagattacaatccaggagatatctcaagaagaaaaaagttctaacatcatgaaggttaaatgatagaagaagagaggaaaagaatcccacaggaatcatgagagcacttggcatagaaaagcagaagtaattcaaacataaacttaaaaaaatgctttgaatcacatagaaaagcatacgtaagtcatcagttggtgctagatgtatcttgaaattttgaacttttatacataacataaactgaaaagagcacaagttttataccaatgacccaaaaccacaaagcaatttacttttattaacattggagtaaataccagtgtttgctggcttgtggcttggatatgaaacataaaagaggaaaagtctgtttggctttttttcccccaaaagtaacacagctggcaaaaggcaggcattttacctcacttataattgtctggaaatttaaaatagaccttttatttttttttaagtttatattgaaattccatctttacatgaaatcagcgagcataggtttaatagcacacattggtctctcatgtgtagtttgtattatgtgaaagaccagagcaattttgatcaccagcatggcacagctcttaattatcttggggtgaggttgcttgggtagctccaggatcacccgaatatttaaccaattgtcttctgtgctactatgaccattcacctcctggaaggtcccagagggagttacacacgtagagaataagttgagaaaaattcattaaaaaaaaaaactctgaagttctttttaaggtcctgaagaacttgggcagggtgacttgggtatcagctgctgaagatctagacatgattggcttcctaggagtcactttttctttttatagtacacccactttatgtagcagccattgctagcagagactatattatctgtgtttagggctcagaacagaaaaaaatgagaaaggtttaatgcttttcccattggtagtaaatctgtgataaatgtctagaatccaggacctggattgaaattaaattggtggaaagctatgactcctagtcaattgtgacatggcttccagttagaaatctatcatgaaagcatccaagtagtttctgtatctgctccctacccctcacttctcccaatccttttttttttttttaacttttattttttgagacaggggtctcactctgtcgcccaggctgttgtgcagagtcatgatctcggctcactgcagcccccatttcctcagctcaggcgatgcttccacctcagcaccccccgagcagctggcactacaggtgcgcgctaccatgtgtggctaattttttgtgtttttagtagacatggggtttcaccatgttggccaggctggtcctgaactcctgacctaaagtaattcacctgactcagcctcccaaagtgctaggattacaagcatgagccactgtgcccggtcacattttaaacatttttttgtagggatgaggtctcactctatttgcccagtctgatctcaaactccagggctccagctatctttccagcttagcctcacaaagtgctgggattacggccatccccatccttttttctttacagtggcatctttttgaaacccaaatcttattttgtcacccccttcccaagtctgcttaaaatcattccatggcatcccattgttcctgggttcagctgatgtttcttcaatgccttggtccttgtcccacccacatctctagccagttatctctgcttgccgttgttctctgagctcctgctccagtatccttcttcctgtccctcacacttgccctgtactcttcctccactgggctgtgtgcatgccatctcctcccctggaaggctcttccctctttacttccttacctcctactcattcttcggatttccactctggagccattttctttttccttttctttttttcttttttttttttttctgagatggagtcttgctttgttgcccaggctggagtgcattgatgtgatctctgatcacttgctcactgcaatctccgcctcccaggttcaagcgattctcctgcctcagcctcctgagtagctggcattacaggtgcgtgcccccaccctggctaatttttgtgtttttagtagagacagggtttcaccatgttggttgggctggtctcaaactcctgacctcgtgatctgcccccctcagcctcccaaagtgctggggttacaggcgtgaactaccaggcctgcccgagccattttcttaagtaggtcaagtctgttcattctaacctccccagcattgtctgtttttttctgtctgaaatttaaaacaattgcagttttacatttgtgtgtgattatttaacgactgtcttctcccctccacaagcttcctcaaaccttgcgcttcttgtgtggagcacagagtctttcctgttacagtaggtgcatgcaaatatttgttgaatcagtgaattatctctgagggtgaatctactccctcatcacagtggaagactggaacttaaccctctactactgaatttagaaacttgcaatggtcgtgcctctcatctctttgtctttcctgcctaccttttttgggtgcacattctgtatgttttaaacatcaaacttgcaaacttttcttttggactgctgcattcctaggagcccagaactaaactgagcggggagggaattctccaagttgcatttccagcagtctttctcctgctggcgtctattttttcattctcagcagagcccccaactttcttccccctgtgctgccatttgttgcctcctttttggaactccaaagtccataagccagtcttgtgggggctggttcccacctgcccccgcatttgttcctgtctgagaaatctgcttgatgagtctctgaactcatcaagtggtgatgagtctcaagtcccgctgccagcacaccagtgaggtccaaaatgtcttggccaaatgatcttcaaaggcttgccaggccttgagttaaaatctccactctggcatgacctcctgctacctcttctcctccagtgtggatcacaattcctgttctcctggtgctccctgcccattttcctccattggtttcttctcccttgtaaagaagttcgtatgcagcacgggttacagcccacttctttggttgctgttcccatctgtcacatggagggctggatcagcaggttttcctcctccagtttttgtttttaactccaaagctagtgttttatattgatacttctcctctctgagtttgagattatccttctaaagcccaagtaataattttctatacatgtagaaaatgtgaaggcttccttccctatagaatagatgtaagccaactgtggccccactgcctgattttacaaataaagttctattggagcaaagccatacccattcgttgtatctattgcctatgcctgttttcacactacagtggcagttgaatagttgtgacagtgtctcttgtaaagcctaagagatttactgtttggctcttttttttttttttttttttttgagtcagagtctcgctctgtctcccacactggagtgcagtggcacgatctgggctcactgcaacctccgcctgctggattcaagtgattctcccgtttcagcctcctgagtagctgggactacaggcgcacaccaccatgcctggctaatttttgtatttttagtagagacggggtttcaccatgttggccaggatggtctggatctcctgaccttgtgatccgcctgccttggcctcccaaagtgctgggattacaggcgtgagccactgcgcccatccagtctggctcttcttagaatacctttgctgacctctactctagatcagtagttctccaccccgaggacacattaaattaactgggaagcttccttaaaaaatggcaatgcccaggccccacttcacaacaattaaattagactctctggctggggccatatttccaggtaattatgtgcaatcagattgagaagcactgttaataggtttcccttcatttcttgattaattgatgaattctacttcctgggccttccaaatttatgactaccaaggcttagaaacagttcggttcctcagcctcagctgagagatggagagattacaataaacctcatgcttcactttatctcaaaagtccctagtctgccctaaagctatctctaaatagccagaatgatagatttcctgtgtcatttttcaggttgttcagtacatattttcggaatataccttcttttactattaaattccttcattattattattatgttttaatcatggtaaaatgtacataacataacatttaccatttaaactatttttaagtgtgtagttcagtgacgtgaagtgcattcacatttttctgcagccatcaccaccatccatccacagaactctttttgtcttgtaaaaccgaaactctgtacccattaagcagtaactcctcattctcttgccctccagcttttggaaaccaccatgctaccttttttctctatgaatcggaatactctaggtacctcgcataggtggaatcacacagtatctgtcctttgtgactggctgacttcacctaacatgatgtcctcatgccttcatccatgttatagtgtggatcagaattgccttctttttaaaagctgagtaatattcccatatatatatgtgtatgtatatatacacacacacacacacacacacacacacacacacacacacacacacattttatttatccatgcatccatcaagggacatttgggttgtttccatcttttggctattgtgaataatgctgctttgaacattagtgtgcaagtatctctttgagtctattaaatgttttttaaccagtgtattagttcgttctcatgctgttaataaagtcatacctgagactgggtgatttatgaaggaaagaggtttaacgaattcacagttccacatggctgggaggcctcacaatcatggcagaaggtgaatgaggatcaaagtcacatcttaaaggcaagagggcatgtgcaggggaactcccctttataaaaccatcagatctcgtgagactcattcactgtcaggagaacagcataggaaaaacccacccccatgatccaattacttcccaccgggtccctcccatggggattattacaattcaaggtgagatttgggtggggacacagagccaaatcatatccactgagtatctttgattttgtcctaaggagaattcagatctggcacatggtccttattattttcacacaaaagatgatgttctgggaaggtcagaggccagtaagcattgcacatcttgcagttctaccagaaaacagaatagtcaacattgtgcttgtaggtacccctgaactcagaggctagataatgctcaacagtgttcctcactgtacattggaagcattgacacgtgcgggacgccattcatacagcgtcacatatcagaattcaaaagacggtgcttgcctgatgcttgtcaacattttgataatctccacttttttcatttgcttttcatatggtaaaaatgacagctctttggaagcctgagagttcagtatagcaagcccacagagcaaagcttacatgtttgcttttatttttacaggtcttcaattatttgagcacaaatacaaaatccaaaaagctttgagaagtggaagttttatttttcttttaagtttagtctttttgttctcaactggccggcctgcctttattccctccctcccctcccctctctccctccctcccctccctcctttcttccttctgccctgcctgacttgccttccctgccctgcctgccctgccctgccctgccttccctgctcccctcccctcccctcctcctcctccctccctccctccccctcctctctccctccctccctcccttcctcccttccttccttccttctttccttctttccttccttctatcttcctttggtaaattcatttagcaaaatcttgacctgatctgaaatgacattaggttattctttatcttaatgtattaaacttaatgtgaacattcatacattttaccacagaaatattgtgtttgattacagagtgcttccccagatcttttagaggtgttacatagtagacagtacatatcttaccattctaaaatgtaacacattaccaattagcttcaagagttttgggtaaggcatgtagtcctgcattataaggtatctcgttttctgtcattcaggtaagatcaaaggtggtgatcacactttggccacctttgagagtcttactttcgtacacacctagtgtctctttcccagtgtagctggtgggtggcagctcggatttctaactctgggcttttgtgtgttgggaatgtttgtaaagctttcttatggagagaccgttattttttaagaggttgaaaaactgtcaccttaccctgggaaacacaggcaaagtgtttatcctgataattttcaaacccttcttcccaaaagactcatcagaggacttgttgtcatgagttcactccaacgtagtcaaacaggcagctttcaccgtgatatttgtaatgatgttgcaggtgtttagggccaagagtcatctgtgcatccactgggactgaggatgataattccttttatgaggtgggaattagtaatctgggcctcctggtagccggacactgatgtttttaaagcctacctcccacaacagttgaaataaagccaagcacatttgagtgactgacactcctcctcttctgttgatcttgctccttcttcaggggaaacagatctgttacgttcttctagcatatacaagtatggttacaactcagaaatcatactatgctggtctatttgctgcctccctctttcaatcagtaataggtttccaaagtctttgaagtcttgcttctctagaatgtcctcctgtggcatcaatgactcccctgtacttgtcaaagtgagagaggaaggtgactctcagtgcgggccatgcttgcagccataggcattcttcatagtgtccaaggcatggccagcagcacacattccaaaaaagctttccttttagttagttaggtagtttatttatttatttgaatcccaacaggaaataatttctttttagttttaacaaccttttttaggattatgtcatagcttgttttgagatttatttatttatttatttatttatttatttttgagatggaatctctctctgtcgcccaggctggactgcagtggcacaatctcggctcactgcaacctctgcctcccgggttcaagcaattctcctgcctcagcctcccgagtagctgggactacaggtgcctgccaccaggctcagctaatttttgtgtttttagtagagacagagtttcaccatattggccaggctggtttcaaactcctgatctcgtgatctgcctgcctctgcctcccaaggtgctgggattacaggtgtgagccaccatgcctggccaagattttgtttttgttttaaagcagtcaggctcatctttgagcataattatgggattttgtgttcatggataataactgcagtggccaaggttcttgaaggaggcagaaggaggaaaggaacatccaatgggcaccccttacttacccactacccatgtatcagttcaccatcctcactcttcacctttttctttcctcaaacctccaacaccattcttcttttagctttgtcaacggatcacttctaaaagcaacctgaagagaactgctcatttctcaccaaatttactatctgccctgcatctgtacccatttactctgtcttcattcctttgcaatggatgatctctccctgctcgtgtgtaaggctagaccttacccttgtgatctacatcctttcacccattcagagatttgctctttgttcctgcaattgtcatttctctctttcctatgtgagggacttctctttctctactgggtcattcctttagtatgtgccctctctacacacccatctccagctacttcttttctactcattcagagagttgactatgctattcctcctttatccactccagtgtacacttctcctcaccattctgtagaaattgctcatgtcaaggttacctgtgtcttctattgccccagatccaacagacaattcccagttctcatcttacacaaccccttaacaatttggactattaaccacgcctcttctcttcaaacatcttttctccatcttttctgacttaatggttggctggccctaggattcagtccttggacctcttctcttgcacactccatgcgtgatttcatctagtggcctctgaccgcatatttcgttctctctcttatttctgtctctattgtctagggcctgggttgaaaggacttacttgaaaagaaagagaggcgattcttatggagaggttaaaaaaggaactacaaaggttagggaagttactggtagctcccaggattttgaagcataattgtttttgtgtctgaggatgccagtctttccaaactaagacttttttttttttttttttaacatagatggaagactaatcatgtctagaggttggagttttgaattgttagtagaaatcttaaaatagtcatgtgaaaaataacagaaattgtagaatagcaacagttagatctcaactcagattaacaaatacattttgagctatcgtgttagctttaacttactaacaagaaaatatttttgtattaaaaattatcgtgctagtcacattgtggtgaagttcaactactatgcattatgagtgtgggggcacagcagagctttgctttagaagctgactcaccttgaactgattttaataaaagcttgaggatggtggaaagagctgggtggaacaatgcttaatatttcaaagcaaggacttgaaaatctatttctgcttcttagtaataggatctctgaggttccagaattatttttgaactggttcactggctcttggaggccctgctgccccacgtccatggcaccgatgaggctcttgccgtaattgcttttccacctggcatttgatgaaaattggggaattacttggtcatatagctaagaagtatccagcgtttatcctcctagagattggatttaatggccaaatggctggatttggccgtgtccatgtctcagagctgcttaattgttaaaattcctgactgctgtgttcctcaattcagtttcaaattaaaaagtcaagtgtgtgtgttttgtatctgtattgtgaggcaggctgtgatctacctttttgacttactcattccagccatgtatgtttgttcctggaacttcctttagctctgcacacactcttttcttcctgcccatctgagctcagcacgcctttttggaagccttccctctttaataccctactctcaccggacttgtttcacttctcttgaacatctacacacaagtgcacttgttacttttctttccttaacttttctgtaaactgggtgccttatatggtgtgcaattttaattcctttatggtttaaaagattctgcacagggcaagcacatctgtaggtagtgttgtgtgggtagtattgccctgtaagtccacgttttctttctttcaagagaagccataaagaaaccatttgttgtttttgcttaaatattagctcttcaaatttttaaattttggtggcttatgcacatttttttaaagtaccatgtgtgccagtacagcaaaggccaaacgacacatgtaggcgcctgtttggcgcctgaagccatgattttgccaactctgcagaaagccagttccttccctccctccctccctccctgcctccctccctgcccctcccttcctccctctctttccttccttccttcattcctctctctctctctttccttcctactttcttctttttctttctttctgacagggtctcactctgtcaccctggctcgagtgcagtggtgccatcacggctcactgcaacctttgcctcttgggcccaagtgatcctcccatctcagtctcccaagtagctgggactataggtgcatgccaccacacctggctaatttttgtattttttgtagagatgggtgttgccatgttgcccaggctggtctcaaactcctgggctaaagcgatcgcccaccttggcctcccagaaacccagtttcctaaggcaagttccacagaacactgaccccacccattggataattttcctgcaaggtagtcttggttagacagattgggaaacagtattttatccccctctggagaatctcattagcatattgttggcactgagaagttcaaagttaaaaaacaaaacaaaactttttttaaaacgcaggattccccaagcttacttgaccatggacccttctttccacatcacatctcttaacatcccatggagctaggattctgcagaaaacactttgggaaatgctgctgtaagcctttttttttttttctcctcggtaggccagagaataaatgcgaaggccaatctccacgaaataataatgtaattccattcaagacaagaggtgaagaacagatattgcctctgcattttaactcctcccagtgccataaaatgacaacttggtaaatgttgatgtgagtgtgaatcttttaaggacctgccaataccgagagtgagaagaggaaaggtgtgtgctgtttactgcatgttctttgagatgttagttctgtttctttgactttgctcaggtttgtcattttgtgcaatggtacatcctggtcccatcactaccaacgtgttgcataatggatgaggctgaagagacccaggcagcaggcagcaatttaacaaaacagagaaagaacagagctgttgatggttggaaaatgcattagtcttttctctcttttacaaacaacagatccctgtgtcaatcagtagtaaaatagcaactggtctgttttgctggttctactgatcacctcccttgcagtgtaatcaagagtctagttcagggcctttatctcaccctgatacaagaatcaactgaaaatggattaaagacttaaatgcaaaacctgaaagtacaaaactactaaaagaaaacataggggaaaactccatgacattggtctgggcagtgatttcttggatatgaccccaaagcacaggcagcaaaagcaaaaatagacaaatgagattgcatcaaacttaaaagcttctgcacagcgaaggaaacagttaacagtataaaaagacagcctacagattgggagaaaatatttgcaaatcatacatcagataaggggccaatgtccaaaatatagaaggaactgtaatgactaattaacaagaaaacacataaccttattttaaaaatgggcaaatggcaggcacagtggtttacgcctgtaatctcagcactttgggaggctgaggcaggggcatcacctgaggtcaggattttgagaccagcctggccaacatggaacaaccctgtctctactaaaaataaaaaaattaacaaggcacggtggtgcgcccctgtaatcccagctactcgggaggttgagacatgataattgcttgaacgcatgaaggggagattgcagtaagtcaaggttgcaccactgcactccagcctgggcaacagagtgagactctgcatctcaaaataaaaataaaaacaaaaatgggtggtcaggcgcggtggctcacgcctgtaatcccagcactttgggaggctgaggcaggtggatcacaagggcaggagttcaagaccagcctggccaatgtggtgaaaccctgtctctactaaaaatacaaaaattagctgggtgtggtggcaggcacctgtagtcccagctactcagtaggctgaggcagcagaatcgcttgaacccaggaggtggaggttgcagtgagccaagatcgcaccactgctgtccagcctgggcgacagagtgagactctgtgtctcaaaataaaaataaaaatgggcaaaggacctggatagactattctcaaaagaagacacacaaatggccaacagatatatgaaaatatgctcaacacctctaatcactagaaaaatgcaaaataaaaccacaatgagatatcacctcacacctgttagattggctattatcaaaaagacaatagataacaaacattggtgaggatctggagaacgggaaccctcatacactgttggtggtattgtaaattagtatagccattttggaaaacaatagggaggttcctcaaacaactaaaaaataaaattatcatatgctccagcatcccaccaatgggcatatacccaaaggaattgaaatcagtgtgtcgaagagatgtctgtgttcccgtgttgactgcagcactattcaccatagccaagatatggaaacaacagagtgttcacaacagattaaaatgtggtatatatacacaaaggagtattattcagccttaaaaaaaaaagccaggaaattctgtcatttggacaatatgagcgaacctagaggacattgtgctaaatgaaataaaccaggcaccaagagacaattttcaggagtttagtggagacctttgcttttgttttctattgcctacctgtatccaggaaatcagaaacagccatctgaaaggacgctagtttacattattcaagtacttgtgtctttctataagatgttgactgtttataaataagagtatatgcaagtttagaagtatctgaatgtttatatagttacatgctttgttttcaatcattatttgataaaattctccaatttcatgaatattcagaaattataatacagttggagcactgcaattggattaactcttagtcctataatgtatgtcatacagactgtgagtttgcagtaggggtctggagccagttcatatgactggggagaagggattgtgtctgtttcttccccactttgcattcagtgatatcaggttgagcatgaattcagctaaggtgggaatgttgaaaccacagaagctggcaaatgctgtacattaggaatctccctattcccatgagaactggttgttaaacaaacattttagaacacccttagtcctaggtcatttctcaggatgacttgattataaagaatgtgggagttgaacagtgaggacacatggacacagggaggggaacatcacaccctggggcctgttggagggtggggggcaaggggagggagagcattaggacaaatacctagtgcatgcggagcttaaaaactagatgactggttgataggtgcagcaaaccaccatggcacgtgtatacctatgtaacaaacctgcacattcagcacatgtatcccagaacttaaagtaaaataatacaaaaaaagacattaaaaagatttttaaaaatacaatcaaggaccttttagaacacagtgagtgttttaacaataacacaattgcctcttatttatttatttttagagacaaggtcttgctctgtcgcccaggctggagggcagtggcatgattatagctcactgtaaccttgaactcctgggctcaagtgatcctcctgcctcagcctttcaaagtgctgggattccagacatgagctctcacacctggccctcacaattgccttttatatctttattcctttcttcatttccccagtcttttggttaatggtgtttaagctgatgtgtggccacaaggtcccattgtttgttggttggttggttaaacatgattctcacctattagtttcataaagaataaccttgctttttttcctgtaatttcaagaggatagtccagttttgcattgtttccttagagttcttggtaataccctggagacagcacttgttcttcattgctgtgggcgttgttcgtggaggtggaggtaaggagagccaaatacagagcctgagcaaggttcactcctgtgcaggccaagatggctgctgctgcctctggcggggcaacaccacactctgcatcagcaatgctcagtgatgaatggcattttagtgggctgggttaccacctgctgtctgtatcacaaaccagccaaaagaacagatttcctgccataatacattatttataagtctaaggaaccaaaggaagataagtagggaaatattttgttccaaaaatgcctgatggtattaaatgaggcatcttgtcttccttccttctgttcccctccaccctcccttaatggatatgtattttcattccataggggactgagttgtatataggattatttcaagctggattctttgggtacttgtgatgattttttaaaaacaaagataaaaatccagggacctgacaaagattgttattatttcacccctttggtgttgagtgaattgacaataaatgcacagatgtgttgatgtttttctggatttgggggtttattttcttattacacattttgaggaaaaggcgcattgaagagagcagaaggtgtcataggcagtggaagtctgatctttctttgcaactcaactgataatagggggaaatcagcaacatatttagacaacatggcacactggctaggagggcaggtcaggagccagactgcccagcttagaatcctgggtctgccacctgctagctataggaaattgggcaaattacttaatggtctgtacttttgtttcttcatctggagaccagggataataataatgcttatatccaggctcctgatagcccactgagcacttttgtgtaaattagaaaaggcagctccccagggtggactctatgggcttgggtacagacagtagctttatgtgaattaggaaaacaggactcttccttcagaggagtttgcgtggtttagcaaagagagctcaggctgggtgttccccccaccatgacaacctgtgtaagcagctgtggtagctctgactaccacaccgggtgctgaggagtaaacgagttgatgaagattcaataaaagatgctgttattatcatcatcattattttgaggtgacaagctagagtagaagagggttcagaagagcctgtagtttcgtgcagagtaatcttagaaaatgaagcaatttgctgaaagcccttggttattagcaaaactgtggctagaacacagttgtcttgacttttggtttttgccaatcctgactaggcgttgctacacaactatgtgattcaaacaaaaggaccattgatagaggataggggtgaggggcactgcggtcagtcccagccccaggtgccactgagagccattcaaataacaaactcttagaagatgatgggttttcctcctaaaaccaaacagtatatatgttcctttgtccaggatttaagtgttcatttaaaaatataccatgaagtaggcatgtggggatcacagctaccaccttaatggtggacttgaggaatattagtagatgaagatgtatttctgtaatatttgaactaaacagctcttaaaagtagcatttctcgccacagtgttttctgagtacaactaagtggaaaaaaatacctttgtttcttataagagggaaaaacaagggagttgagctactgtgcaagttaagctacatttttccagttccctgtaaaacctatttcattataaaatgtaacacaagtacagagaattacatgaaacaaatacatagcttagctaattattgaaggtgaacagtcttgtaatgactactcaaatcaaaaattagtattttaccaccctggaagcacatttgttgctatccctcaatgatcactccttccctccttcctaaaatcctcttctcattttccgttgatcacttccttgcttttctttatagttgtgttgcccaagtcaagcccttttaaaggataggctgattgaactgtgatcattctgtctttatgctgagcatttcaccatgttttattttcatttggtaatctaataacttgtttgggtgaattctattagtttcctaacttgagtttgatgcctttttaaatgccaagaattggtgacatacaacagttttgtggttactttggattcttacctaaaaattatccagttattagaatatcaaatagtgaaatcgatcacttcatcagacagctctacaactgttacaggactgtgtgttcttggcagagcctctagttctagttctttgcctgaactcaggaagccaaggggctcaaccccttcttccttcccatcctcattggtaacgtcatgtcgatttgatggctagtatgtgccatttctatgtagtaagcagatgaagagtgagttgaacataaatgtagtgaccaatagtgaactggcaaatgagtgtcattagtgaaaataaatatgaaaaactcctagaaattaatgaggtggcactggacaggttgttgacctgagtattttccctgggctgttgaactactttcagccctagcccccaaacattttattgtgaatgtgttgaaacattcaaaagaaagaaaaagaaagggaagggaaggggaggggagggagattggttcaaagagacccatatacccaccacctagtttcaacaattgttagaattttctttatttgcttcctacacacacattccactctactattttttcggtcatttcaaaataaattatagatgtcaaaaccctttccatttattttagtatgcatctccaaagtgcaagaccattcctttatataaccaccatgccattatcactctttttgtttgttcaaaatagtatttcacttggtcctccaggctagagcacagtgctgtgatcacagctcactgcagcctccaactcttggctcaagctgtcctcttgcctcagcctcccaagtagctgggtctacatgcatgtaccaccacacccggccaaatttttttgtttttttatagaggtggggtctcactgtgttgcccaggctcgtcgaattcttggcctcaagcaattctttcacttcagcctttcaaaatgctgggattacaggcgtgagccaccgcgcccagcatcactcttaataaggtgaacagtgatgccctaatatcatcaaatgaccagtatatatttagctttccccaaatgtgcccaaaacattaattataaatattcttttaaactaggatctcattaaggagtatacattgcaattggtcattatgtctcataaatctcttatctagaatagcaacccctccacttttcttcatgacatcaactttttgaagtccagttctcttatacaatgtgtcattttttggatttgcataactgtttcttcatagtctcatttaacccagataatgtgtataggaggttatcacatgggcttccccgtgtgattttgtgctcagcacttaccaacccaaatccatcgttgaagtggcaaatttgcctcaactagattttctctccgctgggcagcttttctgaacaaaaattgcaaccacctgatttagacactccagttatggattttcttctccttaaatatgaagcttgaaaaaaaaatagaactaccatttttgcacactcagtaagtactaagtgtcctattagatggttcctacccatgatttccaacctacaggttggactgttgtcaatcagacttccataaccatcttttaaaggaagcaggctcagagatgtgaagccatttgtccagttcccaagtgccagacctggaattggaatgtagatctgcctaattcacaggttttatacttcattatgctgaaggctagctgacagatggactgatttgccaaaattaggcaagaactggccgggtgcagtggctcactcctgtaatcccagcactttgggaggccgaggtggatggatcaggaggtcgagagatcgagaccaccctggccaacatggtgaaaccccggctccactaaaaatacaaaaattagctgggtgtggtggcatgcatctgtagtcccagctactcgggaggctgaggcaggagaatctcttgaacctgggaggcggaggttgcagtgagctgagattgcgcctctgcactccagcctggagacagagtgagattccgtcaaaaaaaagccaacaactaaaatgtttattcaagcagcaacatgatacccaggtaacaataacactgtggtcaaagcacatctctgctcctggaaatggaggcaacccatgtagcctacgagctctccactagtccattttctttctagactcttccttctctctgctctcaagtcagttactaaggctttatgctgtggtaaagctcattttgagtgttgtctgtctttctgtgcagcttctgttcttcctttttgcaaggcaagggcagcttaaggatgtgcaaacacagttttgctaaagccactcgcatgtctccggactgacccattttctgcatctagatcatacaagggctcgatcagaggatttaatgctcccaggatgcttttgagcatcggctgtattcttaattagatttttttttttttgtagactctgtcagtctgtgtctataaacagtaccttctggttttctgatgacatgatgaaaatataaatggattctgcagattgcattttattttcctcaatattaagcactcagagctggtgctggagggaattatggtcggataatgttgattaaataacctcagggctggacttctgtgctgtttctttgccaacacaaactgaatagatatagggaactattgttattaaagaaagtgtagcagtgtaactgccacaggaagaagagttgggcttcagaatgcagcatggtggggcggtgaagccctgggctgggtgaaaggagaactgagtctggactcatccttgctgctagctagttatatgaccttgagcaagtcacctgatttccaggacattattttcctcatctgtaaaatataggggttgtgcgtataacctgaactttagcataaagaaaggacatagatggatctctagaaagatccctggatgctgtgtgggaggtggcctgtggaatggctggagtggaagcagagagatccctcaggtggcaactgcagttgtctggctgagagatgatggagcctacactagtgtcatagcgtagagacagagagaaaaggacagacctgaaatatattttggggggagaatgttattcttcttggtggtttgaatgtatctctgtgttactcggggagggagatggtagtgctgttcattgatatggaggagaccagaggtggaacaggtcggagtagggaacagatgttaagactttggtattgatcttagtgtgaaatagttgttttttttttttttcttttgagactgagtctctctctgtcacccaggctggagtgcagtggtgcaatctcagctcactgcaacctcggtctcttgggttcaagcgattcttctgcctcagcctcctgaatagctgggattacaggtgtgtaccaccatggctggctaatttttgtatttttagtagagatggggtttcgccatgttggccaggctggtctccagcttctggcctaaagcaatctgcctgcctatgcgatctgcctgccttggcctcccaaagtgctgggattacaggtgtgagccactgtgcctggcctgaaatagttcttaggtacccaagtagagatgttgactaagaaattggatacttgattctggaccagaggtcagtactacatgtaaaaatgtgagttatcatcatctgtgagctgtagagagccataggattggatgcgactacccggggaaggaggtaggggtggtacagagagaagaaaagagatgcgaagagaggagaaaaacgcctgcaattacagctaggaagagaatgacatagaagtccctaaggctgtggaggaaggagtatttatggagaaaggagaaggaaatcaggaatgtctgctggtggggaagactgggagaggcaagggatccaaaatggagggagagggtgactgtcatgcttctgcgatgttacaatcaaatgagaaaaatgtcttttgggttagacagtatgacaatattagaatataagaggagagccaggaaagcgtggccttatttaagatcagggaggaagctgaaaaaaggactggaaagggagaaaccaagaatgagatccatggcaattttattattgctgccaataatgataatggaatgtcctgagctcttacaatggagcaggtaatataatctgggttttagagacattaatttatttattcttcatgcaaacctttggagtaggttccattagcatgtcttaattaggaaagctgagggttggtacaagttcattaattgcctaagatgatttagcttatgctggggggctgagaatataaggattttcagtgagttaaatgaggacagcttgcagatggctgagctatgatgatagggtaatgggtataggatactcatataggaagtttgggctgtgatgggaaggagaagaacaggatagtgattagagggctggatcgaatgagggtttttagggaaagaggaaactgccatgctatcactagagaaatgatggatgctgtgggtagaggggtaaggttgacatacaaaggcaggacctagggatgagaagggatagggcccagagccttaatggaggaacccagttcaggaaggagagaatgtatttctgccttttgagctggcaggataaaatgaaaagataggtgtggatatggcatgtttttggtggggggtgtggggccagggatggtggttctaaaggaaagtcttccccaatggtctctgtctcattgcaattccaaccatgagatcattggctatacataggagtgggagagtccacggagagataattaggagcaacaagcaaaatgtcattctggaagaatctctttagaggtaggaaattggtgggaaatagggaaattgattaccaaagaactcctccccttgctcccatcttctgggttgtctcttttgttctgggttcaggtgtaacccatagtgctggcacacaaggcccttccccatctcgaccatgcctactctggcacctcatcacctaccacccttctcatccccacctgccgggaaccctgtgctcaggtctttgaaagcttttggtctttgttcaaataaacctttgtacaggtctttgtatctgcctggagcgccctacttcatctccttccttgggaaattccttcttatctcaggaccaactcaaatgtcagccgctcaagggccttccctgactgtcttaggagagagagtttattcttcagccctcccataatattttgctcaaatgctgcaccaaagggtgcttaactgtgacatcaactctgtaggcacattccctgggttaaatccaggctctgttttttactagttttgagcccttgggcaagttacttaacctttctgtgcctggatttctttggctttaaaatagaagcaataatcaaacaccataaagttgttatgaggtttaaataaattaatgtgacaagcatttagaacagagagggcatattgtagttgtgatatgaatgtgagctcttatcattcagctatttcttcagttatgcaatttgtgttcattgcttcttccatgctcttgtaactctcttccattaatttattgaaaaccacacatcttttccatcaatctattgttttctaatgttttattttttccctggactgtgatttctacagggttgggaccagatcttgtcattttggtcttacaccttttacactgactgacataaaacaggaatttggtaaatgatcgattggttgatttctaattatggcttacatgagtgtgatccatcaatgtttacaaagcacttctgtagaattttgatttgattgtttctagcaatcccacaaagggtttattcctcagaaaatgtcaaaagtagataaattttgttctgctttatttcacaatttaggtataaaaatatgcagagatgttcttcttgtgaattaagtcaaatataaatcagaagagagtaagcataatgagctacagattatcttcagtgaactaatgaggtgtttgtaggaggaaatcacggtcttctgaaaagtgtgcctgcttttgtacaatttagggaatatattcatgtctttcaaaagttgccaaaatctgttaaatctagtattttgttccagttgcttgaatctaggcaccattatttcatcagccaacagaatctcctcttaagatcattataatagggtttgtcaacatttgtttaaactcttcttcagacagtttgtgagtggactgtagtttgtctaccagattgctttcaaaaaacaaccaaagattaatgaaaatatttctaaaataccttttataaaaatgggaacgatcaggctgcgagactgattcttggcagcctttgactttttatggcaattacataataacaatggttacaaagaaattagcagagtggagcatactcatatacagtgttttatatcacattgtaaacacactgtgaaaatgttgccataaagttgtgtggttttctttattagactgttttttttaaagtcccccatgtttcttatttggatggttcagagcagtgccattgacatagacaaacttagaaacataattaccttttagtcctgtggaaaggaaataggatacagatgagcttcctcaataattacttccataaaatagtgtgatgacacattaaaatctcctcttgcttctgcttttggtgtaactgctaaagcagatgaacacttttcttttcctttaaaatcatcaagattttggtgaattatccattcatggatagtgttaatcttcgtgtccctccaagaaatattttggttagtgaattaatcctaaagcacaaagcaagaaaactatgctattgggctttcttgaaaggcacacagggcatagttggtgacataattgccaccgtaagtacttctgagggtcccctttaatggagatatatatggaagtttattatgcccacctttaagacagtagtgtccaatagtttttgtccgtgcatgcccattagtttgtgtgtttctatgtttactcctttggttttatgttgctcaccattagggaactatgagaactttcacttaaccttgagtgagatggggagctatgggagtgggagcgagggtctgagtggaatggtagcatgatttaattttacaggattaccctggctgctggcttgagaatagatggaagggaggcaagggtagaagcagcaagaccagttaggagacccttgacctatgtaggtgtaagatgacagtggcttggaaaaagacaatagaatgcaggcagtgagaagcaatgattctggctaagttctgaagggagaatcaacaggatttgttgataggtgtggttaggtgtggaaagatagaggtcaagcataactcttaagattttggctaaacagctgcaaagatagagctgtaaggattaagtgatcaatgggcaaggatcaagaggatgagagagcaggatttgggggactgatgaagtgctcctgacattgcatgcagcttttcccctactggcccctgaatgcttctgaacctgggctctctcttcatcacttccatctcgggctctttttaagagctctgctaagcttcccgttctcctaagcttcccatcctgcccttgtgtctttggagagtgatcatgagctgatggtttgcccagtgccttgtctggaaagttactgagagtccttcgtcagtcaggatccaggtggcacagtaataagggaaggcagtcactttttatgtaccctgcaaatggactgttggtactggtggttgattcttggcagctgttttgctgtttatagcaatggcttatgctgtcatgaggggaacaggaattagcagtctttatagttagtatatagaatgtgtgatattgtaaacatattataaagatgttgctgagaggggtagttgagacaggccatcccaaatcctgactccagtggaaggtcttccctctgtggttctgaactgctggcttagtttagtatacgaggtgagggctttgtgaaatgtactgtgcataggaatcacatggggatctttttaagatgccagttatgatttagtagttcttagaggggatgggagcactaagaatctatgtctctttctttctttttttcttttttattttgagacagagacagagttttgctctgttgcccaggctggagtgcagtggtgtgatctcggctcactgcaacccctgcctcctgggttcaagtgattctcctccctcagcttcccaagtagctgggattacagatgcatgctaccacgcccagctgatatatatatatacacacacacacatacatacacacacacacacacacacacacatatatatatacacacgtacatatatatattgtatttttagtagagatggggtttcaccatgttggccaggctggtcttgaactcttgacctcgtgatccacccgcctcggactcccaaagtgctgggattacaggtgtgagccaccacgcccggccgagaatctgtgtttctaacatgaattgcaggtgaagatgctgctgctactggtctaagggccaaattttcagtggcttggtccttattgaatttctgcagtctgtacagctgttgatcctcctaacaaagatccaagtgcatctatcctaaatagatggaatggatggcatttgaatcggtggagagcagtgtgaagaccgtgctcggtcctaatgggcatgggagagggacaacagagagcagaggaggaggaacagaggtggaaactagcatcttcctgcaaacacatggtgcctattcccagaattgggtctaagaaattgaatttgatcagactacatcttgggggacttttgattagcagactgacttttagattattgtatcaacctctacttgaaaattttcagtggctatgcattacatactaagataattttaagtggtacatgaacaatttaggttgtatgtggggcaccaatttttttatattctttttttttttttttttttttttgagacggagtctcgctctgtcgcccaggctggagtgcagtggtgtgatctcggctcactgcaagctccacctcctgggttcacgccattctcctgcctccctagtagctgggactacaggcacctgccaccacgcccggctaattttttgtatttttagtagagacggggtttcaccgtgttagccaggatggtctcaatctcctgacctcctgatctgcccgccttggcctcccaaagtgctttttttttttttctatagattcttaatagttatgttatcttgtatttatcataagagtttagattgcttttctcagcaatcggtgagcttcctgcacacagtggccacagttcatctgtggttctgtctctagatactgctcatcatcattgctcaatacatggagaaaggcctaggtaaactgaaccagagattctgaaataaatgtagctaaactttgttgggctgtcaatgttggcactgttttcactagaacataatgcttttgacaaaaatgtaaagacgtatgaaaaaatgttttagaacctttccaatcacttcttggtgaacaaagttagtattatagagaggcttagtgatgtttccaaaatgtaaatcattctgacagatgacacatcagtggcagaaaaatcatggacagattctgggaaaaaaatgccaatatgtttaaagtctatgtttaaaatattagctttttaaatgggatctttcttaatttctttattttgggaaaactcgatattcataaactgttaagaatgactttttaaaattcattttcttaccctccctcaaataagaatgagaggatactaacaaaataattgtttgtaacattacatagtgggagtggttaatgagcatgttttatgatagaatttaaactttggtttataaggaaaaattgagaccatttagtttctttagattttttttgtaacaaaaagtcttgtttgatttttctgatggttaaagtaatatatattgtagaaagttttaggaaaatattgaaaaatttaaaaagtaaagtaaaagtcatatatgattccattgtgaagaaataccattttggcatattttctgtgtatgtgtcttataatatctgtctggtttcgatatcagggtaatactaacctattaaaatgaattgggaactattctttccttttcaattatctggaagagtttgtgtagaattgccttatttcttccttaaatatttgatatgtttattaggtaagccttctgggcctgacattttctttgtgagaagggtatctttctatgtctttgttgagtgaactatggctgttcgtgtcaagggatttatcaagttcatctaagttgacaaagttattggtacaaatttatttataatttttcttgttatccttttagtatctatagtatctgtaataatgtcattgctgtcattcttgatatcagtaatttctgccttctttcttttttgactaaaaacaaaagggttactaattttattggccaagagtttactaatgtagccaaaggtttctaaattttattgatctcacaaaaccccccaccagcttttggtttctttgatttttccctattgtttttcagttttgtatctgattgatttcactcctgagttttctccctttcttcacttaatttggccttattttgatgagataaagcacaattcattgatttgagatgatcttttctgatatgggcattttgggcatttctttaccctaaatattgccttagtgtctttccatacattttgatattgtcatattctttcactacaaaatacattgtaatttctttttgatttcttctttgatcagtgggttattaagaattatgttatttagtttaaaaatatttggggattttccagtgatatttctgttattagcttagaatttaattccattgcaatcagataacatattttgtatgaattcttttttttatttttttattttttaaatttatgtagttcattttatttccaagactatgagttatctagtgagagttacatgggcacttgaaaaaatatatatatagttgacccttgaacaatgcaaggttcagagcatcaactccccattcagtagaaaattcacgtgaaattttgagtccacaaaaactttactagcagtctactgttgatcagaagccttatcaataacatagtcaattaacaaatattgtatatgtcatatatattatatactgtactcttttaataaagtaagctagagaaaaaatgttattaaaaatcataagggacagaaaatctacttactattcattaaggggaagtggattatcataaaggtattcatcctcatcttcatatggggtagactgaggaggaggaggggttggtctcgctgtctcaggggtggcagagacagaagagatggagcaaatagaaagagaggcaggaaaggcaagcacactcagtgtcacttttaatccatgcgtaagtggacccacacagttcaaacctgtgttgttggagagtcagctgtaggctctgctgctatttttttttctttctttctccctttcttttttttttttttttaatttattgatcattcttgggtgtttctcagagagggggatgtggcagggtcataggataatagtggagagaaggtcagcagataaacatgagaacaaaggtctctggttttcctaggcagaggaccctgcagccttcggccctgtttgtgtccctgggtgcttgaggttagggagtggtgatgactcttaaggagcatgctgtcttcaagcatctgtttaacaaagcacatcttgcactgcccttaaaccatttaaccctgagttgacacagcacatgtttcagagagcacggggttgggggtaaggttatagattaacagcatcccaaggcagaataatttttcttggtacagaacaaaatggagtctcctatgtctacttcttcctacacagacacagtaacaatctgatctctctttcttttccccacatttcccccttttctttttgacaaaaccgccatcgttatcacggcccgttctcgatgatcgctgtctcttcggagctgttgggtacacttcccagatggggtggcctggcagaggcgctcctcacttcccagacagggcggccgggcagaggcacttctcacttcccagacggggcggccaggcagaggcgctcctcacttcccagacggggcggccgggcagaggcactcctcacttcccagacggggcggccgggcagaggtgctcctcacttcccagacggggcggctgggcagaggtgcacctcacttcccagacggggcggctgggcagaggtgcacctcacttcccagacagggtggtggccggacagaggcgctcctcacctcccagatggggcggctgggcagaggcgctccccacctcccagacggggcggccgggcagaggtgctccccacatcccagacgaagagtggccaggcagaggcgcccccaacttcccagatggggcggccgggcagaggcgctcctcacctcctagatgatgggtggctgggcagaggcgctccccacctcccagacggggcagccaggcagaggtgctcctcacctcccagacggggcagccgggcagaggtgcccacttccccgacagggcagccgggcagaggcgctccccacctcccagatgaagggcggccgggcagaggtgcccctcacttcctagatggggtggcgaccgggcagaggcgctcctcacttcccagacagagtggccaggcagaggggctcctcacatcccatactgggcggccgggtagaggcgctcctcacatcccagacgatgagcggtcaggcagagacgctcctcacttcctagatggggtggcgattgggcagaggtgctcctcacttcccagacggggcggccaggcagagacgctcctcacttcctagatggggtggcgattgggcagaggtgctcctcacttcccagatgggggcggccaggcagaggcgctcctcacttcccattcggggcagccgggcagaggcgctcctcacttcctcccagacggggcggccaggcagaagcgctcctcacttcccattcggggcagccgggcagaggcgctcctcacttcctcccagatggggcagccgggcagaggcactcctcacgtcccagacggggcggccgggcagaggggctcctcacatcccagacgatgggcggccaggcagagatgctgctcacttcctagacggggtggcgggcaggcagaggctgtaatcttagcactttgggaggccaaggcaggcggctgggaggtggaggttgtagccagccgagatcacgccactgcactccagcctgggcaacattgagcattgagtgagcgagactccgtctgcaatcctagcacctcaggaggccgaggcgggcagatcacccgaggccaggagctggagaccagtccggtcaacatggcgaaaccccgtctccaccaaaaatacaaaaaccagtcaggagtggcggtgtgtgcctggaatcccaggcactgggcaggccgaggcaggagaatcaccggagcccgaggcagggaggttgcagcgagccgagatcatggcagtacagtccaggctccgcaagagagggagaccgtagaaagagggagaggctccacaagagagggagcccagagggagaaggggagggggagggggagggggactttctccctttctttttggctcccatgaattcttttaagtgtattgagatttgcattctgactcagaatttggactgtcttcataaatgctcactgtgaacttaaaaaaatgtacattctgcagttttagggtggaatattctagaaatgtcatttaggtctatttggtagatagtgttggtcaagtcttctatagcgttattgatttttctctctacttgtcctgtcaattattgaagagagatatataaatctctgaatctatttgtggatatgtccatttctctgtatagttctatctgttttggcttgcatattttgaagctttttaattaggtgtatgaatgtttaggattcttgcatcttcctgattagtgaacctctttatcattatcaaatgattttatttctgttgttatttttcttctgaaagtttctttgtctgatatatagttatatcagactttcctggaaaaaaattatttcctaaacaatacagtgtaacaatgatttacatataaccatatatatatggttaatccagctttcttttgattagtgttatcatggtatatcttattttattcttttatttaacttttttgtgtctttatatttaaagtgcatttctgtagacagtacatagttgttggatcctgcttttttagccattctgacaatctctgtcttttaattggggatgtttaaaccatttatatttaaggtaagtattgacatggtcaggtttaagtctataatatattgtttttctatttgctccttctgttctttgttcccctctcccttttttgttgctttttaaattgttagtattttttatgatcaattttatctcctttcttggtttgttagctataactttattttgctattttagaggttgctttagggtttatagtcaagtcaggcttccgtatccatgagttctacatttgtgggttcaactaactgtggaccaaaaatattaaaaaaaaaaaaagcatctgtttttgttgtcattatttcctaaacaatacagtgtaacaactgtttatatagcatttatattatattatgcagtgtaatctggagatgattctatgtgtactggaagatgtgcataggttatatgcaaatactacacattttttatcagagacttgagcattcacagattttggtagccgagatgggttttgaaaccattcccccatggatattgagggatgcctgtatacttacctggtatattttaggtgctcaatacatatttcctgaatgaacacatgaacaaatgtctccctggtgcctaggccacagggctgctgagagccagaggcaccaagagtggctatcaatcctgtgctgtcagacaattattctttcccagcttttaattttttctcttttatgccatattattaatggatattggctttaatcttcccatcttgatgttagtcccttgagattagacatccatatcctcttctccctcagtccctggaggtttcagtaaataaggactttatcctcaggtgtgctttccccaggcttttttgaaagtgtgcatggggtggatcctctggatgaaagagactgtggccttgacttattgtgcccaaacccccaaaagtaagaaattcttgtcaggaagggtagatattgtttaaggtagtaaatagaaaaaaaggcttcaaagaaatggtctaaatttaactttagctgatctaggcaaagctacacatgggaaggaaattcaggcctaacagattttccccattcttggaatgccacccgtttttttcaagattattgaaaaaaaattatatatatataattatatatatacacacatacatatatatacacatacatatatatacatacgtacacatacacatacatatatacacatacatacatatacgtacatacacataaacatacatatatacacatacatagttatatatatgtacacacacatacacacacacatatatatatgattggacttcttgattaaaaaagaaaaacttatgtgctctttttcttttcttttttgcagcaagtaactggcagaagttttggtgataaagattttcggacaggtttagaaaatggaatcctcctctgcgagtaagtatagcctatattcagttggttttattcaaaaaacatcattaatactatccagtttggctgtaagacttctagtgttttgttttgaatttattcacagtttgaatctgaaactcaaaaaatccctgggctagacaagaaacacaagtcggtgtgggagccttggtgtgccagtagggagtggtggggactgtggcaattgcaaacaagacagagaaagagcatctggtagctgctgttcagctccaataatctttcactgtgcatcaatttgagcccatgtaattgtaagggtggacctaattgtggtaaaagtaaaacttttctccccttttaaatcccaaacaaaagcagcttgtgccaaaataaaacagtgcttctatatacttacaacatcttaaaacatgccgggtaatgctcctcactttgcctgtttcactggtgtatttcaaatatgtttaatctgtgctgttggcaaaatttaaatgtgaacaataactacagtgtttaatttttgtgttttaaagaattcagggctcctgtgaagtagctctagctacaaaataagcagagccttcgtacttataaagacatatatttcaagatttatggatagacgtaaatttcaagatttcaaaatttgcatttatttaacaggttttgtgatttcaatactgatttttgttttattgaggtgaaatgtacatacaatgaaacacacagctcctaactgtacaatctaatgggtattgaaagatgtgtacatgtatgtaacctaatcaagatatgaaacaaaaagtttcctcatgccccttctcactcaatctcaagcccctggagacaagcactgttctgatctctgtcacagtagcatctattttgccttctcttatacttgatttcagtggaatcacatagaataaactcctgtttttggcaactttcagaatattgcttgggatccaatgatgacacggaaggaatgtgggtttggagcctgtggactagagattgatgttcttactttacccctaaatcatttaatcaccccaagtctcatttttttctaaaatcataataaaaaatgtataactctattttgtaggctttttatgagcttcaaaaggatagagtgagtgaggcactttcaaagattatgcagcactgtacaaatgttgactattttgttgaacctctcaacacagctcctgtcagcatttttttctgcctccccactgctcttctttcttcaaagaaaaatgtgtatcttctatttgatgtttccatattctctttcctacgaagtctctccaccctactcgtgtatccctcaccacctcttttctcattattacatttaaatcagagcttaactcttaggtaagctgcagttacttcagtggatgcaagctcagtggatgcaagccagtcaggctctgaactctttctctctgttctaccacttgcttttcccatgattctgggcttagccctctcctgatattaacagactagccaaaatctgatctaattcatgcagaccatgttggttcaattgaagtgggtctttggtccaatttttgtttacctaacatttgctccagagattcttgtaggcatccacttctccactatattctcatgcccaggtaggtaggatgaaattgtctaagtcctctaatcacaggggattagacccactggtgtatttgaaggagcacgagctttggagtctgaggactagggatcaagctctcgtttccccagtgggactctagctagcaggcccagcaaagagtttgctaaagtggaatgaaccacataggaggccagaggcaaggaaagccagtagcgtgaacctctgctaggtccttcaagagaaagctgggtcaggagccagagaaaccaaatgcacacaaatttctaggcatggaacttgcagagcaatgagaaccaaaaccatgacccaggagctgcatgcaatggtgactggggacaggggaggaagagttttcttcctcacccttatggctaggttttgtgtaagttgagactattaggctgctacagactgagattagcaggtgtattttctgggacttgtatcccaaggccaatctagcaaaaagggggacttgctctgttgaaaatgtgggatcgtttgatggtgggggccaaaagctggaacactcagcatggaggattttagaagttgaaggctcccagacagtggagccacacaggtgtcaaacacctgtctttggagattagattagaatgcctaagactgtaccactctctagaactggagagagtttagtggatgccagtgattaggagtctaattcatagctaccccacaccacagaaacattaagaaatatgaggactctctacaatttcaaattttgaaaactaagcagtttggctcttcttagaattgggctttttatagtatataggctttaaaaaattatttgatgctttccagttttgtgttattcaaaatagaagcccagttggtatcttggaacagtgttatcccagttggcaaatacatgagcagcattgttgaattctttcttttgttcaacaaatgctcatctttttgtctgagttgaatccactctaaatgttagtagcaactgtgtagagacaccagcatctttgttcactaaaaatttcctgagttgttgtaggagtctaaagaaaaaaaaaaaagcttcatcattttcatcaaacagaaggataccttctggtcctggggtctggtttcccctgaccagcctggtttcaaacttagctgtggtctctaaggaatattattatacctattttacagagaaagtaactgaggtacaaaggattaaataacttggctaagatcatacagataaaaagtatttaagtttggccgggcacggtggctcacgcctgtaatcccagcactttgggaggcaggggcagatgggtcacctgaggtcaggagttcaagaccagcctggtcaacatggtgaaatcccatctgtactaaaaatacaaaaaattagctgggcttggtggcggatgcctgtaatcccagctactcgggaggctgaagcaggagaattgcttgaacctgggaggcggaggttgcagtgagctgggatcgtgctactgtactccagcctgggcaacaagagcgaaacttcgtctcaaaaaaaaaaaaaattaagtttaggaggtctgatcccttagctcttgctcttaatcactgccctgttctagaattgggattttaatgggagagaaaagaaagagattggcaggtggagagaggagagggcattagtgcctgcagacctaagtttggggaaggtggcagtgcagagggtgaaccactgagtctcagctgggcagaggacaaagaaggactgcatgtggttggtggtcttagaaaaatgtaagcatcaagggcctggtggttccacttgggctaagaaggcagcgtcaataaaagtgagggcaagagagctgaaagggtcggaggctgtggtcagtggaggatgtaggagtttcagtttttgatagagcagtcaagaccagatggagacaaacgagaatagtggacctggattaaagactacagagacaggagagagaaaagacgagcacctacatacagcatgtacgatggaaatggaataccctcaaaatcaccctgggacatctcttactccatatggctttgaatatgcaactcctatgccggaatactaatacataaatgtataacttagagtaatagcaagtataaaatagagtgcctgtgcccagtggaatggcagtagatgtgtttttgccatactcatgtctctcttcctctgttgtttttgccaagtgtgtgtgtagttgaagtttcagaggttaaatgcttaaatggtgtgaaccctcttctgagtatttaataagaggctggggtcaaagtgtgacagagccacaaatatgtgacaaatgttatgctgttagaaatatcaatcatatacggcacagtgtccttgatgacttacgagtcaaaaaggagggctgcagagagttagtctttaaagaagctactcccaggttggagtcattagcagatgatattctctacttccctgcacatacaccggcctgttttgaaataactccagaaaagaaactttctgacttgtgttcctgactctgattttattatttagataagagtctataggatcaggggctggcaaattatggcccttggcctttttttttttttaactggccttcttgctaagaatgtgttttatgtttttaaaggattgtaaaccaaactaaattaaacaagagtctatatgtggctcacaaagcctaaagtgtttactatctggtcctttacagagaaactttgccagttctaaaggactgtggaattaattttagatgtaaattgtttatccttgtaaagttaagaaattgagtttgggcagtgcaaaatgctatttgggtaaattaaataacattttacaaaaggttttcccaggagtctctttacaagttttctcccccacctttttattttggacaatttcaaatttatagaaaagttacaagaataatataataaatatccatataccctgcacctcactatactaattattatcattttgccatatttgctttatctcttcatgtgtatatatgcctctttttccctgaaccatttgaatgtaagatgcaaacatcatgaaacttgactcctaaatgttgcagggtggatcttgtaaatataggaacattatcctccgtaaccattcaaggcatttagcaataatatagtaacgtttaaagcatagtccagaattaaatgttgctagtatccccagtaatatcctttatactgattttttaaaaatctaggatctggccgggagcgatggctcacgcctataattctagcactttggaagggcaaggtggggggatcatgaggtcaagagatcgagtccatcctggccaacatggcaaaaccctgtctctactaaaaatacaaaaattagctgggcgtggtggcgcatgcctctagtcccagctactcgggaggctgaggcaggagaatctcttgaacccgggaggcggagattgcagtgagctgagattgtgccactgcactctagcctggcaacagaacaagactccatctcaaaaaagaaaaaaaaaatctaagatctaatcaaaggtcacacattgcatttggttaccatgcctctttagcttccctaaacctagaacaatccatctagtcttttgtgtctttcatgacattaacatgtttgaagattccagaccagctattttgtagaatatatctcacatttggatttttctaatttcttcctcatggttaaatccaggttagacagttatagcaagaccacgtgggtgatgttcttggcatgggacatagtagggtttgtcccattgctggtaatgttatgagtgataattggtcaaggtgatgtccccaagatttatgcattgttaatatgccttttctattttgtcatctgtgaaagatactcaagttgtggaaataacttgatatccccagatctttcatccaatggctttagtatctattgatgatactttcctgaatcagtcattacactgagagttgcacaatggtgactttctaattctgttctttctacatttgttagctgtcattcttgtgtctttttgaagaaaagagcttttctccctcctctttttgagtatcaccaatccattggcatccatacttttacattacccttaatcgctaaaaaattctctatagataacgaatgaggtaagtgataatagcaggcctgttttacaaatacaaccagaatatagaacatctaagattttaaagtcagtccactgaaaaaagattttagagcttttgtgttcatataggtagatggttcatatttctgtttgcttttatattattttccaattcttgctttatcttagtgttcacctttggcaaggtcagatgtcctgccctggccaatgttcggacagaatcaccaatatgactatgttgggcacacctgcccaaggaaggagcttccagtgaagacttaagagacagacaggcactagaagagtataaccatcaagggcctggtagtcccacttgggttaagaaggcaggttcaatacaagtgagggcatgagagagctgaaaggttaggaggctggggtcagtggaggatggaggggtttcagttttcgatagagtggttgagaccagatggagacaaatgagagaggtggacctggactaaagactacagaggcagaagagagaaaaaactagcatctacaggcagcatgaatgatggaaactgaggatcatcaaaatcaccccgggagatgacatatttcagcatgggggctccgggtgaggtcactggggagttcaggtaagaactctgcacaagaaagaccattaatggccactgtgattttctttaacccctgagaaaagtacagaccacacatgagttagttctacagggaaccttcaatatttttaagttagttatagtaaagattatttctttgaaagcatagatatatgtggatgagaaagagcctgctagtggcttaccattttctatctgatctgaagcattcactgcaagaaccttaaggaaatgaattcttaagtgttttagaatctcatgtcttttgaccagagctgtatgaaagacatatttctatttgtgaacatgaagtggtgtaattggcttagaaggccgaaaagattccctcactttttggtattgcttgatgctgaaatcaagaattgataagccttgtagagataagtcatctagtcgccacatcaaaaggagacagaggtattccagcccttcttttgtttcttctgctctcatgttgcctgtttagggataattctatgaaatatttcagtttttttggtggggtcattctagagaagggacaggcttccttatattttgtctctaaagtataaatgaaagtaactggaaaatacccttttcctggtgatgaggcacaattactgaattatagaaaacaatagaagacaaattaattcccttgtccactgtattaaatctttagtgggaatcttaatttagaatcaggaaggcgggtttaaaatcaatggcattttcactctcatctcccggtgtagaatcctttttttttttttttttttttttttttttaaaaaaaaccttcaatttttattttaagttccagggtacgtgtgcaggatatgcaggtttgttacataggtaaatgtgtgccatggtggtttgctgcatagatcaacccatcacccaggtattaagcccagcatccatgagctattcttcctgatgctctccctcccccaatgacttccccctgccacactgacaggccccagtgtgtgttgttccccctattgtccatgtggtctcatcattcagctcccccttataagtgagaagatgtggtgtttggttttctgttcttgagttagtttgttgaggattatggcttccagctccatccatgtctctgcaaaggatataatttcattcctttttatggctgcatagtattccatggtgtatctgtaccacattttctttatccagtctatcactgatgggcatttggattgattccattcttcgctattgtgaatagtgctgcaatgaacatatgcgtgcctgtatctttataatagaatgatttatattcctttgggtatatacccagtaatgggatcgctgggtcaaatgatatttctgcttctagatctctgaggaatcgccacactatctaccacagtagttgaactaatctacgttcccaccaacagtgtaaagcattcctttttctctgcaacctcaccagcatctattgtttgactttttaataatcactattctgactggcgtgagacgatatctcattgtggttttgatttgcatttctctaatcatccgtgatgttgagctttttttcatactggtatagaattcttttttcactttcctcatttcctacttgtagagatgtgtcaaaatgagttaggtctacatttaaagatgaggtttttttggtggtcgggttgggggttgagttgaagtttgctagtgagaatttttgttgttgtcagtgatagaaatgcaactgaaaccagtttaaacaaaaatgggatgtgattggtttatgtgaataagcacggaggtaaatcacacacacacacacacacacacacacacaccccaggtacagacataactatataaccatgcttgaattgtgttatctgactggtctgtctgtccatccatccatccatccatccatccatccatccatccatccatccatctcttgcctctgctttcttctttattgactttgtctttgggtaagttttcccatatggtgacaaagttggctactattagcttttagcttatattttactagctttgcaatcccagcaggaaaaaagagatacttttttggagtaattccagtagaagtcctggtgcctgccctttattgacgtgaattgggcctggtgctcatctcggaattaaccgaatggccaggtctggatttgcccttgcttggagccaggacgtagcatgggcgctctccacagtctgccctaccctacaactgccctactattcctggagagttggggaggaaagttgctcaagtggaaattaagaagctgttatcaaagaagaaggaatgactattagaccaacaaaaccaatacaggcccgctgagggactcttccatccaaccaggacagacagcctttggaacttctagtggagaaaaggtgagcttaagagtggtgtgaaaggtttattaggtctctttgaggccttggttagacttacataggggtgtgttcagagaaggatgctttggagggacttacgttttcagacctgtcctgtcaggagtccattcctttatccctatcctctctaaactatggagtgagttaccttggtgaggtaaaactgaggccaccaaaatctatagatcactccttccttgggagtgttgccggagaaaagcctctctcctgagaagcaggctttgtcctctaccagtcggttccctcagccctcaagtgataactgcccttgctctgagcttcctcccagcctttttacctccctctctaggggtttgggctgatgcttccaggagctgccatttttctgatgtggctgccacgtttcccaactcttctgcctccgagcacttggagttgcgagagagacctctctcccaatgacagctctttgagcaaatcttagacaggtgatcctctgagtagtctgtactttctccttttaatttatagtaccccctactgaataacttggcaccaattctctgagagtggacaggagaccttggagctatccagttcagtttctcctcacaaccatttgctgtctcctagaataaggcccctccattttcagctctgtccaacctcagggtctgtctctgcatacttcagacctttctttccaggggttggggttaatgtttgcttccctggcattagtcctgatatctcttcattctgagtttcctagtgtttctttaaccatttcttccaggaggtctaggggagccccagtcaatgggatccctgtggagctgttcaaacatcctaggtaggttttgaaattgatgagctcctgtgtctccacagggatgctattgatgtcatcagaacaattcctttttgcatctgagcagttccactcattgcagataattcacctcctctgccctgctcacttcaagccagtggtgcttcccactcgtgggagcaaccccatactcaccttcagattcccaaatgctccctggcaatggcagtatgcagatactcttcatggctatttgtagcttgcgcatagagaaatgcaaagccaagtttcagtgagtgtatgactgtgtttattttcttaccttgattcttactgatatgctctcccttattctctggtttgcttatcattttccccactcctttcttccatttttgttactatctaaggacatatatttaacaaaagccagttcaaacccttttatgagagagtatagtggaaagtgaatggattttggaattccttcattaaatcctatgaaattgtgtcaatagaccaaaaaatagtcagataatgtgatttcctagggttcaacctagtagatggagcagatcctagatttgcctcctgtgtatccttaggctagtaacctaacctctttgagtcccccagtttacttttatctataaaaacagatcataattgtaaaaatccatataggattgttctgaggataaaatgaattgaaaatatgtataaaattctttgttcagtgtttggaacatagcaggcacttaaatgttaactttcccccgttcgtctatgtaacagagaaattactacttcttgaggtttctaggagattccagtgagagaatacagtcaagcactcagcatagcatctggcacttgcttggcaccctgtaccactggctgttcttattattgtttttggaaatagtccaaaagtcaattatgaatatgacatagtcattgcaactctgtgtcactgtgcacccagtggctcgctcccttgggctgccagcaagccacgggatgaaggcatttggattatactttctagcttctctcatctagcttgtgatcaaaaactgggcaagaaaatttgggtcccttacaaacttgatcatgtgtgaataatgaactttggctggcagagcttggggactagagtgattgttttgaaaacaataaccctgacctctgtggtgatgtcattttctcccatccatccagtctgttgtggttttcttctctgggaagctgttccagaaccttctaggcagtgttaataggttcttgtctggctgctaagtacccatacacaactccactttagtgctattatagagctctacctctttgtcccatctttgtaccggattgagagctttcttgaagaccctttgtctttgtatttcactcattggacactggtgtagcaaataatccatctatagaaacacttggtgaatagattgagaccaagttataagatttctacctaggccacctgatcatcaatgactgcctttaactttctcccagtcttagtcagtattattctctctctctgtgtttctgacacacacacacacacacacacacacacacacacacacacacactttgtataaacaacagacccatccctaaagactgggagaccaaaggatggatgtatttgctttcttcaagtgtaagattctctattacaaattccatcttcctaggagtcatagaactgaacttaaaagttttgttttgcaaacgtattgtcatgaaatgaaagtgtgagtatgttaatctacaaataagtgaccaataaagaatgtcttagtggatttttgtctcagttcctgtgttgctgaaatgattttccaaagataagaaatctgttggcaaacacttattctatcatcactgataaatgagctgcttgtcagaaggaggtctggccttagattcttgtcatgatttcagcatgagatgtggtgtgtcacggatgtgtcctagtcttgtaggacaggttgagggttgatggtgtaactttgtgtggagacattttatcacatggaggaattgttggctatcgaccatgtgctgcatagcaccaaattaggcaccaagaggcataaaaacagaatgtaagacatgatcttcaaaagttttatgatgtgcttggggactggacccacacacacagagcagttaagttacagtgtaaaccagtgtacgagtaaatgtaaaaccaacaaagatttaatctccaagatttaataagaggttaaatgaggatactgttatgacttgggagacagttaattggggagatataatattaattgactattaagaataggttgagggaaagggaaaatcatctttatagagaaaaacaagtagttttttctttctttatactttcataacactctggtcacaaaaatgtgtggtttttatccctcataatgaccaattctccaataccagctggttatcttaaagtttaacttaatctcgacactaactggagataatacagactacacaggttaagggctcagtcccacaagactgcccccacccctcatttagatgccagttgcaaataacaggtcctcaggtgatccacaacttctgtccacttggctacaaattggaggctctcatggcctccttcttgggtttgaatatttatcagaatggctcacagaactccggggtacatccgtgtatttatggatttattctaaaggatctgataaagggtacacatgaacagccaaatggaagatgcagaggggaaggcgtggggccaagggaatagggttttcatccctttcttgttggtccatcctcccagcacctccacacgcccagcaacccagtatatcttcagactcttgaaacagagggattgaaaccgggatttttatggaggctttgtcacttaggcatgattggttgttaattccatttccagcctctctccccttcctggaggatgggagtggggctagaagttccaagcttctaatcgtagcttggtctttctggtaaccagcctccatctaggagcctaccaagagtcacctcattagagcaaaagacactcctatcacccaggaaattccaagggattaggagttctgcgtcagcaactggggtcagagactaaatatcagagtaaaaaaatgcacctagcattcctattgctcaggaaattacaaggattttagggactctgtgccaggagctggggatgaagaccaaaatatggatttcttaatataattcacagtatcacagcatcctacacagggacaaaggcaggagggaaggtttggagtcaggaatgagtaggctgtgtttggcacatatagaggataggtgcctgaaagggcaaggacatctcttcctttatccaactgacctttataggaacccacttatgagtgtggtaagttactgtaaagatgaatgcattatgcaatcaaatcatgtaatggtggtggtgggaggggggcgggcagctgatttgagatctaaatcctgactgtgtgggatataaatctcagattcccttcaagaagcacatttaggtggagacctgaacgaagaggagaaattattctcttctaccaggaaagaggaaagggaaatgaaagttgagaagaaacatactctagggctgaaagaataacatgattgaaaactctacgactggaacaagctctgtgtcttggaggaattgcaggtagacttgtttggccaaaaggtagaaaaccagtggggcaatggtatgagatcagtgtggatggagagaagtagtgggggcaagattgtgcagggccttgcaagccatataaggatttggtggtttgattcccaagagcaatggaaatgaagaggattttgaagaaatcagcagcacctggtagagtatagtgatgaatgaaagaaaagacaaaaaataattttggtgtttcagttgagtggggtcctgatacaagccagaaaggctcctctgtttgttggagaggtcatggttttagtttgggcaggatgagttcgggatatggacaagccacccaggaccagagtcctgtaggctgttggggatgagggcctggctcttagaggtgagacgatgcattcaacttgctcaagttggatttgtgagccattgtcggacatcagggttaagctatgagatatggaagcctctctgagggaaaggccacattaggaaagagccgcagaaggaggtctcagtttgaggaagtgtctcccctgggtcatgggtgggagaaagagaagctcacaaaagagctatcagagagatgagaggaaacccaggagactgtgaggtcatggaaaccaagagggctaagaagacttttaagaaggtggaggtgacttgtattgtatgtccccagtagatatcagtttgagcaaaacctcagaaaaggcctgccttgcttgcagaaggaaggactggagacttttaacaattaatatgtatctctgggaactgccagtcaactgatcatgattccacctaactgttttaggtctagctcatgtttgtgtatcattccaacagctattgttagagaccttgtgtaatataaagtacacatgcaatcattttctgaaacattggtaaagagatgagattagtatgacccaatggctgattagtagagcaacaatacaacctgtcattcaaactgagacactgttcagagcgaaagggggtattaaccagatgagatgctggaacaagtggaagctgggactgacctcagctaactgggatatatggtcaccccagttattgatgactttagactggtccctactggtcaccattgctttgttcagtattcacaaaccaatcccttatttagtcctcagagcaaccccagtgaacctagatcttccaacccctcttctgtagatgattagatggagacccgaggtggtagggcacaatgtgtctttgcactctttgtctagagctctctctctaacccagatgctcgctccaatctcagcaaacttgggtcctttttccattactgattttggccttagcagactgggaagaatttgatagactttctatgtagggttctcccttgtccttctgccaaatcacaattggccacgctgacttggcctgtctccagctgtttggcaccaagactcattaagcctttaagttcaagtgaggacatttcaacccgctccttttctgaaaaagatctccagtgaaaaagctgctttttgtttgaagattggcctggcttaggtgggggcttaggcaagaattgagtatccccaacaggcttctgttagaaagatgaaaacagatggagaacatggaaggtgaatatgcaggactcatggtgagcagaatgagcccccagtgttgcctctttttttgaatcctcaccaaataaatagcccttggctcctactcaaaagagggactcagcacagtaggggtactgtctccattcaaactgttctttggacatcaattacaaagtctactctgggagctcttgtgtgcacttgagcatcttgcctttggaatattctcaagctcatccatctttgtaaatattctgttcattaaaaattatacgatccttgtcacttcctttctcctaatacatagtcttatatgacccagacccagtagggcatttacagagtttgttttgaagcttcctagaaatgtgtttgaaacttattttagcagaattgtcacttggaaccacttccctcaacatgtggcaattccctcatcctattaatctgctccttaataaatattaaaattctcctgacttgaatctcaggctaatctttctcctcctgaacaaatttttgacagatttttaagaatgatcaattaatttaagaaaatataacaactggtttaaatgtggactgctcatgtggtagatgagaaactggcctagcccattgcctgcctgtggggttacatgctggattaggctttgcttagatttaagaggatttagtagctctaattgtatttccttaataatccattttttgattgtctctaatgggctgtcaggcttggtgggctggcttcccatgatgaagtgtgcaaaatctctgcctcacctgttctgaatgttccctttggttactcgaaggagtggactttttcttaaatagcctactaaggacccagtttataaatgattttttttttttgagatggagtttcattcttgtcgcctaggctggagtgcactggcacgatctcggcttgctgcaacctctgcctcccgggttcaagtgattctgctgcctcagcctcccgagtagctgggattacaggcgtctgccaccatgcctggctaatttttgtatttttagtagagacggagtttcgccatgttgggcaggctggtctcgaactcctgccctcaggtgatccgcccacctcggcctcccaaagtgctgggattaaaggtgtgagccaccgcacccgaccaaatgatttctttaaaaagttaactatgaagaaatagacttccttcttggtatcaagaggaagaaagagtgaataaaaagaaaaagtgaagactgtatatctgagtgattagctctagtgcttgcccttccttaagccactgtagactctgctgggaggctaacattcccaaacatggcttcatcgtgactggtggcctcttcccagaagacggggtgtgattcaagttcctttgcctagaacgtggtgtccctctgtctgggtgcaatgattctattcaactcatcagccctgtccatttgcactggtcacagaggttgatctattattgttcctacaattctctttgtgcttccctgctttgtatctttcttgcatttgcttctagctacctgcagtgctgtattccctgtccatttccatcttcttaaatcccaaacaaacgcaatgggcacctttccctccaccacaacatccccagtgctgcaacctgaattcagtcctctgagcacccatcgctgtgacagccatacatcccgaagtggagatgacaaccctgatttcaactgctgtctccctcatttcttgtttgaaggagaaattttggctgtgcctagagcaagtcatttgtctcacacatggcactactcatgaagttggatattttaactttctattagatgataaattccttgaagtactgacagcgactcacccatctttgtatgcctaatggtgcttgcacatggcaggcatgtagtaagcttttgaagggaggacgggaagaagaaagattattttaaaattaatacttttgaaattattgatatgtttataactaaccagtaaatttgtgtagtaaaatgctacaattttaactcagaatggatcatagacataaatgtaagtgctaaacctacaaaactcttagaataaaacatggcagtaaatctttgtgaccttggattaggcaatcattttttatatataacatcaaaaatacaagtgacaagaaaaaataaataaactggactatatcaaaattaaaaacttttgtcctgcaaatgatatcatctctcaacccacagaatgggaaaaaatatttgcaaatcatatatctgataagaggcttgtatccaaaatatataaagagctcttataactcaataataaaaagataacccaatttaaaaatggacaaaatatcggaatagacacttctccaaagaagctacaaaaatgactagtaagtacataaaaaagatgttcaacgttgttagtcttgagagaaatgcaaatcaaatccacaatgaaataccacttcacacctactaggatggctataataaaaaaggaagacagtaagaagtgtggcatgatgtggagaaatgagaactttcatgcattacttgcagggttgcaaaatgacacagccattttggaaaacagtttggcagttcctcaaaaggttaaacattaagttaccatatgacccagctgttatactcctaagtacatacccaagagaaatgaaaacacacatccacacaaaatcttgtactcaaatgttcatagcagcattattcataatagccaaaaggtggaaacacccaaatgtccacagagtgatgaatggatagatcaaatgtggtatatccttgcaatgcaatattatttggctataaaaaggaataaagcattgatgcatgctacaacatggatgaaccttaaaagcatgttaaatgaaagaaaccagtcataaaagactacacattatataatttcatttatataaatgttctgaataggcaaatctatagagacagaaggcaaattagtggttgtttggggctgggggttgtgggtgagtaagaggggaagtgaaaactaatggatttggggcttctgctagtggaagggaaactaaaattagtttgtagtgatggttgcataatcctgtgaatgtacaaaaatattgaattctacattttcagtgggtaaactatgtgaattgtatctcaagtcattaaaacacaaacacatacacacacaatgggatttaaatttttggcttcaagatgtttaaaaagtcatctagaaatctcattccaaatatcatttagttcatttctgatgtgctagtatcatattgtaaagtgctgctcatattttagaacatcattgaagagaatgtttcatagattgatatttatattgtctacttcaaaagagatataaagaaaattacaaaaataaaactaaaaaaggcacattcattaagatcagaaatagtaacatcagacaaagaaaggccatggaatggaagaatgagaagatgttattacttaaatactacatggcttttgcatcacttaaaactcttcttctgccacagatgaaaaggcgttgcttgctgtttgatgattttcctgccagagcctctggcctcaagaatgtattccccagtcctctgaataaagctgcattttgtatttctgctgcacgcccagtaaaggagaataatgtgtgttgcccaaggggagatggccatattgttttctccttgccccatttgtgtatccggtggtacataaaaaaagaaggacccagagattttactgcttcctttggagccaactcctaactcttctttagagaggaacagggggactccactcattcccatcccctctttcacaaaccaacaggaacttcatgcagtaatgactggcaggaaggaactaaaagcctgtccgatgatcctttccctggtgtggttgcttgaatccaactttagtcttggtcctgagagaatgattcatatatgattaatgggccaggcatggtgcctcatgcctgtaatcccagcactttgggaggccaaggcgggcggatcacctgaagtcaggagttcaagaccagcctggtcaacatggcaaaaccccatttctactaaaaaatatgaaaagtagccaggtgtggtggtgcatgcctgtaatcccagctacttgggagactgaggcagaagaatcgcttgtacttgggaggtggaggttccggtgagcggagatcgtgccactgtactccagcctgggtgatagagagagactccgtcttaaaaaaaaaaaaaaaaaaaaaaaaaaaaaaaaaaaaaaaaaattattaacgacaacaaaagttgtaaatcgttagcaggtctaaagtccgtgatagttccaaaactgatgttttgagtccttcccaatactttataatgttgctcatttcattaacaattcactcaacaaacaaaaattgaggccctaacaaggactggcccttacactagagctagagttacagagaggactaaccctttgcctgatgaagaagccagatagtttctgtgatgtgtgataaatagggaagccaaagagtgttgggacccagaggtggaaggtacagtctctacttaaatggttcggtgaggaggtaacatttaaactgggttttgaaggatgagtaggagtttgttaggccacaaaggagtgagaggaggcctgtgggaaaggcagttcaggggaggaagcagtaagcatgtgaaagtgcctagctatatgaagagactttgtatgctcagggacaaaggctaggacaagtgcaaggtggggcagactagaggtgagaggtaggtatcaagtcagtttgtgaacaatcttgaatagcatggtaaggactttaaacagcatccagtgagcaataggcagccagcacagtctctatacagaagagcaatgggtttgctttttaggcaattacctctggtggcaatggagacttttgattgctttctgctgtgccccaaatacaaataggtgaataaaacaccacgcctcccaaggagcagcagaaatccttactgcacctatcttgctatgcctgtccttagtttacatccttactatgcacatgtacgtctcagaggttctcttccaagttacttgtttagaacttggaagttatttccctatagaagcagttcgcttcacaaagtcttatgtaacccaaaccacatctgagattgtgtcagccccactgttgaacccggcttcttgagtgtgtctgggcttagctggtgtggggtaaacttttgatgacaagatgtggaatgaataggaagtagattcagaattctcatggccacattaggagcagactcccctttctctgtagctgttggcttgtcctcgtcatcctcaggacggcaagtgaggctggggagatgggagccttgaaaagagttaaagcccaattttggcagaaagcagggctggagccagctgtggctgcggtgatcacgcagccgggtctgtctttagagcttctttctgcctttcctttgtcggcatcctcccttccttcctccgcgtccccagcttttctattgccttccgcctgtccagagactacgcctatggaggcctgtccttcagaaggattggcattgtctcgttccctcactgctgttctttcattgcttctaacctagccttagccacaggcaggattctcaggaggagaagtgagccagtgatcaacacagccaattttcaccagtgggagggctgcattgaaatctgcttggagaagatggtaataatgccggccattgatgaagtgtatattgtacaccgggcctgtgccaagtgcattacatgcattgttttacttattccacatcctcaagctatgactagcaggtatttttgtcaccatttgaaagaggaggaaactgaggctcgtggatgtcaaatgcgtaaataacttgtctagtgagttacagggctatgatttgaacccaggtctttctgtctctggagcttcctgctgctcttggaattttatggatcccaatcctggaactctttgttctgagaacttcttgctaaagaagagttgggagctggctgtgtattccaccccaagactggatacagaaatcttcagagctgcatcacagcaatttcaccctctgagttttctctccacgctcttgatagcaaacccagcaataactgggttttagctgcgcaaaggaaatactaattacaatcatttaaacataattactacatagcacaatgatgattgcatgtatcactccctgtgtcagagtaactttagtctccattttatgtagttatactaagttcttttcgtgtgttggcagctttcacggttcattgatcatatgtttcatcctaagcttgtagcttataaaagcagggagagtcttgagtgggaaaggcaatttgggggtgattgggcttgattaccaggtgaaggcatttggagggcatcctgtggcacttgggagcctggaagtccttggaagagggaaggatcccggccagagccaggttttagcagtggtcagttggagtgcagtttgggtgcagtgggcctgtggattaggatggcagagactggtggctggagattatctgtagaaatgcaaaaagtgaagcatcatagaaaagcactctcttcagatttagaaacccaagtttataatcccaaatctaccgcttaggagctctgacctcagacatgtgccttcacctcccggggacagttcctttactccttatctagattatttgatttgatttttatgccttttctagtttccaaagtccataatttccagacagcaggaatagttatgcaaagaacagactgtaaaagatattggaaatggatcaaagcactctgaacatattcaaataattgctgtctgttccttcccatgcttacagtatagatgattttattagtgttagtgttttagtattaagagggatgtgataggcaagaagaggttttatttttccccctagaaaatgtgggaaaataaaaattggtccatttgtttacagtatcccaaatgttagctcttcttccttctgctgccatcccagcaagatccggagggaagtatgtgcccaggtgttaaacttcacattctggaacaggattttcttgggtacagtttgcctgggtattggagaaaggcctcctgcagagatataacagtcaagatagtgctaggtgctgtaagtaataaacccctaaatctcagtggtgtaacactgtggaaatgtatttccactcttgtatggcctaatgttggcaacagggaaggatggagacaactctgctttaggcagttatttagggacaccagctaatagagactccatcttcaacatacaacttccgaggacttccgggtgtcaacatctaactagtaaatgtggaggagagagaatggagaattgtttgagagggtttttagggccaggcctgcatgtgatagaataacttctgcctgtgcttcattggccagcactctattatatagccacagcaaattgcaaaggaggctgggcaataaagtccagtgtgtgcccgagacagcaggaagataagaatggtaagcagtctctgccacaggtgctgtattacagtactgatagcactgctgagccctagaaatacacggggtcaggctcaacttcttggaattccaaatctacaaaaaccttctaaagctcctatgatctcttcttaggtgtgctccaggcaagtggcttaagtgtgacctatatttcacacattctgaaccgtgcatagcatcccacaagcatttggtagatattgatggcagcttgcgttccaacactcttgttcatttgaaactcctctgtttcacatttcacttttccctatattttagtcgatttttcttgatctcagaggatttgttaattttcctggttttgcctgggcaagaaagaaatcttttaaaatgacatctgtaacagatttttggtcaaggttaaattgatctcatgcttaggttcaaaaacagatgccatgttatgttaaatgaaagtgcatatactttcatccagggtacatagtcaaacccagaaagtgatcaaggaaaccacatagaaaaacactattgagccaaattaaaagggacacaaagtgggtaattttgtgatcatagttgcctattgcagctgtacaaaccaagctaatgagatgatgatgtaatctcttgttgcaaagaataaagtgatttcctatgagattaagcatgaactttccaaccttgtgtttaagatttagatagctcttctgttcttcccgaaactctaggataattactagaattgaatttctgagctaaatgacttatagagtaagctcaatcctttttaaatttgcaatcctttaagaattttacctttaatgttcacattacagtccgataacatataagctgcccattgctataattcctaacgtctagatggtctcataaggtaccattttgtagcactattcttagtgctgtgctccttgaagaactactatatgggctgttggaagagtctgtctgaaacagaacctctctcttccagagtagggctttgaggtttttgtttgtttgtttgttttttaagttgcagatagaaaaaaagtcttcactttgtatttcataatcattaaatgatgattgagagactaccacatgctggatattaggggtgcaaagagttattaaatgcagtctgtggttgaattggaacattagcatcattcctgggtgtctcaacaattgtttcttttttgttgttaatttgctttaagttctgagatacatgtgcagaacgtgcaggtttgttacataggtatacgtgtgccatggtggtttgctgcacctattaacctgtcatctaggttttaagccccacatgcattaggtatttgtcctaatgttctgcctcttcttgccccccacccccgataggccctggtgtgtggtgttcccctccctgtgtccatgtgttctcattgttcaactcccacttataagtgagaatatgcggtgtttggttttctcttcctaggttagtttggtgaggatgatggtttccagcttcatccatgtccctgcaaaggacatgaacacatttttttttacggctgcatagtattccatggtgtatatgtgccacattttctttatccagtctgtcattgatgggcatttgggttggttccaagtctttgctattgtaaatagtactacaataaacatacatgtggagcattccatttgaaaaattgtttcttaatcttttaagaactgtgttctatagaatgtgtgcaaagcatatctttaattcaccttctcaaaaattaagatggccgtgaattaggatgtatgacagcgagacacgtatgtgcaccattctggtcttcctgtgggtttttaatccactagtgagcataccccacgaggaggagacctggggtcttccgtgcctttcttcatatccccagaacccagcttcagtccagacatcatgcatacgcaataaatgcttgttgagtacatgaaagaacatatggcataggcttacttgaaatgggttgcagtgtgtttcagatttagaatgtaaaagtttagtagacaccatttcatttgtatcataaaattaacatttatttttgattactctcagtgccattaacttgtttcataattaaggattatccaagatcatagcttttcttcctgtttctagttgtttctcacctggtgtttgctaggcaagctatagacatttgttgacctgattcatttatgtgagatttttatctaaaggtggccagagaaagagaacaagcaaaacttattttggtttttgcaactggctaataggaatattgaaactaaaatagcttgcagttacctagctaaaagggaaatgctcagtatagtaaatgaatgaatttgcaagtttccatttatcaaatgctagcaacacccatcaccccactggattctcactctaatcctgaataggaggcaaagctaattttaaatccccattttatggaagggaaaactgagaccctgattaagaaacctttcagtaactcatagctaatatgtataggattcaactttaaaacctaggctactgactccaaattcactgcctcttcctcttcatcaagctgaatgttgtaagttattggtgatgttttatctatgctctctgatacctatgatttttaataagcagaaattttctatatgcatgtagttgtaactttattttttaccgatttgcaaacagtgatgttttaaaaatataaatcagattatctcagtctctgttttacgaatcttcttatgcttcacattgaacttaagataaaaaatctagaagtcttacctgggcctggattttgcttacaccttggccatcttgtcccagacctcttccttctactcactctcctcagctacattggccttctggttgttccttgaatataccaagtccactcctacctcaaagcctttctgctgactgttcaatctgcctggaacgcttgtcctccagtctctcgttggctaaagtctcttgttcctttgtatcattcaacttttttctcaaatatgacctccctagcagccttcagaccatacaattagagtactactgcgtggcctacttgtgtgctatctgaaattttcttcttatttatttacctgttttctgttccctccactgccccatccactcactgtaccaagattacaaattccaaagaacaagaactttgcttgtcttgttcactgttgcccttcctgtgcctagaatagtggacaacacatagcaggcacttgatcaagaatattggataaacagtaaatatctgaaaatagttccttctcattggctcttacatttttgacattttaaaattttctttatttttatttgtagttgtgggtatatttagcacagaagacatgggatggtacaaatgcctagtagttttgttgtgtaggattatgctaattttccagaaaattcatcttttgatgaatacgaagatgatctcctaccagagagcagactacctgttaaggcctttagctgtatgttttgggaaccacaggcaggaagttggcatagggttctgctgagtggagatattcctccaagtggatgacagcctcctttcctctggatgaggttgcagatcatctgtaggtggaacttggatcctatgtgtcttatacttcaccaacagacactctcttccattttccttttattcccacctggtgttgatattatctcattgtatttaggtcgtatttgtttgggtttttgatttttgtgttttgtctcgaattatgctttgatgacacatactgaggttggactttctaaagcaccaaactgtgaaataaaatggcctaagaggtgaaaactgtcccagctgtgcttcagattagctgtgcatgtctctgggaaatcttcatatctgtttggggttcattttttcttctacaaaaatggtgggacacatacatgacctatctctacagggcaggacttttgggaaataatgcacctcagaagttatataaatataacatatcatcagcataatcacttcaaagcatgtcatcaataagtatttactgaaaatatttatatcttaacttatataggatggcatagtggtttttaataaaattgcaagtgaatatccttgactcttactcaaaaaatctctcacacaaaaaatgtccttgatttaacacaaaatacaagataagcaggtgttgggcatttcaacaatgtgaattcaatgttatcttttattgttgagtattataaacagaacactggattggagcagtgtttacctgaaaaaaaatacagctgtcttagtcttgaaagtgaacattatggctttttattttttaatttatggtaaaacattgtgagagaaatcatagtttctgctacttttaagtaaggcctagtgttatatgtcagttgattgatagattgattttttccaatcttccctttatgtgatagggaagattctgccatataagtgtaatttttacaaaggatgaataccatgaaatattaaaaacagcttaaaaatctcaatatatataaaagaggagttttgaggccgtgattgctaaaaatattaatatagttcttagatatagaggacaaaaagcatacctctttaaaagataattttaaaataatgaattttggggtaggacattttgttattttttctactttgcctaattaacaacaaagctcagatctcagtctgtctggtagcaatggtatttcatcttattagaaaaatctaaaactattagacagagtggttgatctgtcagctctgcagtcatcagtggtccacagctattgaaaagggcatagctccatatgtatggatgaggggtctccaaggtaaattgttcaacctccaaaatatattgttaagtgaaaaaacaaggtgtaggacagtgtgtactatatgctacacatatatatttttaaattctatatattttttataaattctcctctggaaagtctttcaggttgccttcagagagtaggctggagtcctgtggtacaaaggtgacagtgagatattttactgtatatccttttgatgcttttgagttgtcaacaactgtacaaaaatattatcttaaaattcagtttaaaatgacactgttaaaaactactaagaaaagtaatgtatctgagaaaagcaaaagtagcgagaaaaagaattttgtacatttaaaaatgtggctttggagatatcatatctatctgtgtattttaaaccagaagatttgggatatttacaccacctgagagaatgcattgatctaagaaatttgggttctgggcctgagtgtgctactaaccagctctggggaagtcactcagacttcaattcagacttcaccaggcctcaattttctgaactataaaatgagaagagtgaataaattgccttccaactggtaaaaccaataagtccaaaataagttataaagaagcatttttaaaaggttaaatttatggttaaaaaataagtgcattcatgaaaagagcagccagcttggctctccgtgggcaaaacagcacttgtgcactctgagtaccgcctcttggtagcagcatgttggaattgcagtgaaaattaccgagaacagccaattaatcttgcatgcaaaaatggaatatcctgtctgtcacaatcactgtagggacatttctcaacatatgaatatatggtggtatcaaagtcaaagatagtctaaattcaagactattaaaccatttgaaaaatttttgttactgatctgtagaaatctggcaagcacaggttctttataatttgttataaccttggattgcatgaattttaacagaggtcagcaaactttttccataaagcatcaaatagtaaagattttatgctttgtggcccctcaggtctccattgtaactactcaactctgcagttgtagcacaaaagtagccatagacaatatgtaaatgaatgaggatggttatattcctgttccagtaagactttatttataagtacaggtgttggaccagatttggctcatggattgtagtttgttgacctctcaattatgatacactcctaccctaagtttctctttgcacagtattctaagttacctaattgcctgattcccgaacgtggaaataacattctacattctacagccccttaccttcaatcacttatttatgaataacctactttgcaaatactacactttacccaattaccccgatgctaaccatattttaattttataagttgctttccttgtttctcttcactctgggtttttatgtcctgaaaacaggcaatgatagttgtttctcttgcattcccttgcttgtgtaaccattgttatataatttcaatctttagctgaaaatcttttgctcaaatatcttttgtacctagggactcttggttagccttgtttaaaatcttcagaatatgattggctaacctcttattaaacacattcttccctttttaaagtgaaactcaaccacattgaaaaagccactcttctcaaagagcaagtagggtctgacttagaatgtgtcttggcgaatcatttgtaaagatagaaactggtctttgaatttagtgcatccctggagagatccatgtcttagccaggaaaattggcaacaagccttacctgagttgtaatacctggttccagttccagataattccctcacaacctcaatccagctctcccccttgtccttttccttgaagccctcctcagtctctaccttttctcatctctcaacatttctaaattctaaaacttcacctgccgtggaccaacttgatgttggcaaagctcttcacttatatgcatgaaggctgatagattattgagatttactatatgctttaaattcactgcttttcctatccagcaatttagctgtagccccggataaaggtgatttgtgtgatccatcttgctttatgtctcacttgacattctgcctttttcatgacaggttgctgaatgctataaagccaggacttgttaaaaagatcaatagattgcctacccccattgcaggactggtgagtacgtggaattgagatttattttccaatattcctttgctctaacctaggggtcatgacagcaccatttattacagttctctcctgcaatatatattccacttgaatgagaacgcattgaatccattaaacgaagaggtcacttaaaatgaaagattgcagtcatgcctaaatggcatgttaatctttgtttgtgttttttccatgagtgataaggaccttcattctcaaagagctaaatttgttttggtgtgagaggctgataattaggttgacccttgggggaggaatgtgattttaattacgttttctcatttcagttcatcactgcattcccctagaatggagggtaggggaggtagagagaaagagaattttaagagaaaacagtcgttttataataaattgctgctttcaatattataatctacttgggttgaaataccacaattgtaggccaactatcctgaagacatactggggcactaaggtggtctaacgtcatctggagaactgtttaagcagaatccttgcccttctgaacctatccacataaaatctaaaacttacatgttcatatgtggttagaagcagaatatttttttcatgcgttgatatgtcttataattcttggcaactaattttttaattgcttcatcgatgttgcctttgtgtagaaaaaggaaagaagtagaagatgaggaagacaatcaaatcttagttttggaaggaattggcatatgtgtgtgtgcgtgcacacgcgcgcgcacacacacacacagagcagaggaagtatgtagctcggtaatgactcactgattgtttccattgtgatcgccttctgcgcatgtagttttgcagaaagcaatgagaagaatgtcaagaatttaagcaggatcctacgtagaccttactgattgttgttaaaaagcttcttagccatatcacgatgactaattgaaattagatgtgacaaaaaaccaattgtgtttgagaattgtggggggtccttgtgggaaggtacatggtttcagcaagttgaatgaaatagatgttttctttaagaactgctatttctgtggatgcattttattccccatattggttggtagtgagctggtgattagtcgttaaaaatctttctaattttgttcttcagaatcatgtaaccaaataagttagttaatatcgagatagatacatatatttggaaggaatatatttgaatagttctataaaataaataatatataagtattatatatcagtgtatacatatatcaattattttaaaacatttagtaaattcacctcttccaaatgttaaagccaaggtcttaatgatcctgatgaacatctgtttgtccctaagcctatggcaactctggaccctggagctctggggtttaatgttatagaagcaaaatttgcagcataaaactaaggaaggccccaggaaaatccagatgaggagaaacaagtcactcccagtccagtagctaaagagaaaaggctttcaaaacctcaatttaaaatggaaatcataaataattttagtaaaattaactgttaggggcacatgcatttgtctttatattatttcctatcatggatcaaatgttgtttctcacatattgcctctgtcttggagcatttgggcaacttgatacaagaagacaaggtgacctcatcttctttccttctatttatgttcttgactagtattcctctactttcttttttcatttggatttccttttcactttgtccttgctatcgctttttttttttttttgcccctttcaatgaacacctcccctgcttaccgtcaccctgtatcatttatattttcttaactaatttatcatctttagtccaaaaaaatactttcttaagtaaagtcacctactaacccattcactagtgactcctgaatctacaaacctggtcaaactcttttcctttgctccagttgccttgagatcaacatttccacaaaaaccagagcacttgtggccctggtgggaaacagatcgccatcccgcaaccccctgttatgttcatgtacttccacggttctcgcgtcatgcctgtgcctccctctctatgctcatattcttgactgtgtccatgacttcagctctccatgatattgacccaaagcagcatttctcatcaagtactctctcctgaactccagacctcgtgttctgtctattggacagtttcatctcggtatcctactggcacctcaaacttaacatattcaaatgggacttgcatcaccagtcctgtgcacctatttcccaatgtaagtgaaggcatcatagacatgcagttgcaccagttcagctatcaaagaattttcccatttgtctacttgtctgcatttccttggccactgccccagagcaggccatcctcatctcttgcctggactataatagttgactcacagttctgcaaacactcttcactcccatgaatggtgccttttcttgtgatatgtgttattcattgaatactttcctcctgctcttcttgacaaaattatatttgtccatcaagatctaacacagactaacacatcttttaagttaaaaaataaaataaattaaataaaactaaagatctaatgcaaaacagcctcctttgtgaaacctttagtatttatagtccattatgatcttttattatagaatacagagaatatcccctggtataggagaaaatgagttaatactcgagagagataaaagtagctctgttctgaaatatattttggaaagtaagattttgaataactatggttaacagtttgaaattaaaggcctgcaagtggtttcgtattcatgtcaagacactatgtctttaagtagttggccatgatcaaacttaccgatatctataatgggtccaaatgatgttagatgtcctggtgatgcactaagaaatcacagcagttctcaggaaacaatacgacaaatccacattaagggacatactgcaaaacagctggcctgtcctcttcaccactgtcagcgtcattaaaaatactgccccgtcctcggccgggcgtggtggtggctcacgcctgtaatcccagcactttgggaggccgaggcgggcggatcacgatgtcaggagattgcgaccacggtaaaactccgtctctactaaaaatacaaaaaattagccaggcgcggtggtgggcgcctgtagtcccagctactcaggaggctgaggcaggagaatggcgtgaacccgggaggcggagcttgcagtgagccaagattgcgccactgcactccagcctgggcgacagagcgagactccgtctcaaaaaaaaaaaaaaaaaaaaaaaaaaactgccccatccccaaaaggctggaaaactgtcgtagattaaagatgactaaggaaatatgacagcctcatacagtgcatgatccttagttgggaaaacgcaactataatagacattattgagacaattagggaaatttgaatataaattgagtattagataatagtattctctcagtgttggatttcctgtatgcgatagctatctttgtgtatataggagaatactattgatcttagatggcaaatatatatgctggagtattttgaaatgaaatgtcatgtatacaaccaatcctcaatatgtttagcaaaaaagtctgggtacataatatataatttcatatacacatagagataagaaggaaggaaaggaaggaaggaagggagagaggaagaaagggaggaagggtggaaatgtggcaaaatactgtctctagataaagggcgtacgggggtcatggtactattcttgcaaccttttggtaggtttgaaatttttcaatataaaaagttgaggattaaaatacattaattctcttattttcaggggagacataggaaacctcaaataattaatgggtttgaagatggcagagatcatcttgttagtagagatgcagcctttgtgtgagggtatttttcaaacaatattttcttcttccaaatattcatgacagtcaggaaagggcagatagaaaaatccctgaaatacttctgaatacatcaggttggttttttcactttgtcaggggttgacaggccactgaccgtctgttgatcaagaagtccatagtagcaggggccatagagatctgagaagtgtggccagagggttttctatgcctggaagccatgcccgtgtgtcttaatgggctagtgttgagaagccaatccattaagatggcccagctgcttgacttgaagataaataaaaaagtgtgttttcacatagcaatatcaaattataaacatatgtagatttacaaaggcatgaataggtgtattttagcccctgagttaagctgtggttacaaagaattcaggggtgaaggtgttaaaacaaagtagttgaaaatcatttcctggcaagaatgcaaagaccctgaatccgggtctgcatttcttctgcaacgattgctgacatatgaagccgtgtggtgactgcctgcagatgcttgcattctcttttaggtgttagtgatactgtttgctgctgccagagagaaagtcctcaaatttaggtcttggcataccaaaggtttttttttaaaatgctgcacttcagtctgctagctcatcagtattgtactatcgagccacatcttgaaactcaatttagtggtcatcagagatcatgctaaatgttgtttcatcccaggagctttaggttttgtgcaaaagccatgaatgtatgaaatctttgcttatgataggagtttggggattaagccttttcttgcacagatttgaattgtgacagccgtcgtgtgtgcacatatgcacatgtgaagtataattggaaataggtgatatttgcggattctgcccctgagtgctgaaccttcttagagttgtcatgaaatactgtttgatttttccatgggtctgtaaggataaaagtgatctgaggaaaagacaattttacgtcttagatgtatcttagaaggacatcttagatgtgtttgttttgcagatgaggacatgtgggtccataaagggaaattatttgccccacattagacaaacagtaaaagatgagatggatcccgagccctggccacccctctccttggttattacatatacactgttcccagttgaagatgggacacattttaatgacattttattttaccttttttgaaaaagagaggaaggcaaaaactcattttttaagttcatctcttttttttctttctgtcggccaatacctacaaaatatctttctgagctctgtgaaaggccttacttcatgtatcacttcttagcctgatgaacgatggaaatttgacgctagctgaaggtcagaagcagaagcaggaatgtgactggtcagatgatcctaccattcagtaaccctaacccactcagaaacgcattttggggaaaaggatgtacttttctctaatcaaagataagatttcaaatatggttagagcttcctgccatggaaaaaaatgtaagtttccataagttctttagactttaggaagctttcaaaagttatctgctttagtttatgaaaactgacatcagaacagttgccatttcatcgagtgagatcagagtaggggaagtgatgaaagagctgtagtgatttccacattatgagaagattaaaaatattgttttggacaaaactagacatacaaggctgttaacctgagtagtatgagtgaaaagcctttatgcagacttcatctttttaggaggataacaatgcaataaattggggtcctcactgctttgggtgtctagctgtcaagaaaaggtttcctgcacatccttcctaagaattagctctggtgtgcctcaactcatcctgatcaatgtcttctcttctagaactttaccttccctccagtggtttatcttatagattaccttagaaaaaactggttaaagttctgttctccgggctcggtctctcctccagttaaaattgttgttttttggccaggcatggtggctcatgcctgtaatcccagcactttgggaggccaaggcatgcagatcacctgaggtcaggagttcgagattagcctggccaacatggtgaaaccctgtctctactaaaagtacaaaaattagcctggcatggtggtgtgtgcccgtaatcccagctacttgggaggctaaggcaggagaattgcttgaacccaggcagtgagccgagattgtgccattgcactccagccggggctacaagagcgaaaccccgcctaaaaaaaaaaaaaaaaaaaaaaaaatttttttttttttttttttttggccaggaagcaggcaaggcagggaagagggaggttagaggtgaaagttaccacagtgataaccatcacgtatcacattcctaccctgccccaggtgcagtgctagatcatccttcctaatctttacaacacacctgtgatgttgttattgctgtatctttactctaaagttcaaagaaatgtcaccagctttccaactaataagaggcagagttggtacttgaacctgggtttgcccaactctacatctgtgccttttctactgtgttatactctctccattagaccctaggatatagaattgaatctcaacactttccgaacatttgtttggagacatcaacctctaaggagacctaagttgttagaaatcagactctctcatttaaaatttattaattcaaccaaattgaggaagtggcctttttgaaaaaggcactgctacatgtaatgtttctaccatggccactatcaaatcaggcttcatgtggccatacctaacaagtgatcataggaaagcattagaattctttactggagtcttaaaaaaaaagtcagagtgattttattcataatatgcagcagaattacctaaaatgccctcctctctttctcttctacagtctttctctgtcacacacacacacacacacacacacacacacacacacacacatacacaccttatacttgccaactctcccaaacctctctatgcccagtgacctcaaatctttgagcctcacactgtgctagttcttgccttccttgcttcttacccttttgtctgctatgactaatggttagctctttccagtgcaaatcaatccagctagactcggctccttttgcccctgattctgattctggacaacaaagactcagagacaggaagacagaattctccttcatgggtaggggagaaggaagggcttggaataaaaaccctcatgtgtttttcctgctactctgtgttctctgtagtagttgcatggtacgatccggagtctccaggggtcgtcctccccttctttaggggaacaagtaaaaactggtagccaagcgatgttctgtgtgaagaaggcatattcactgagggaaatgaatagacattgtgaggtttctcagccaaaatggaatttaatgacacactttcctttatcctcatccctggcacagtatgagaaacctcggttgcgttcccacaccacacacagagggaatgctcaatttgctgctctcaagtttgatgccaaagccaagccaacataggagtgatggttagcattttagtaggtctagccatgaaagactacacaccgcagggaaaaacaacaaaacacacgaggtctttggtgcattccacctgcattcaattgaaaggtggaatatgaacttggggattctaagtttatttactgcctcccaggttgatatggcttgtgtgctgctgtttgaaacagcctttacagttagcttgtaaaaaatgtacaggtcatctcgtgtccctcatcttctcataattttatatggctccctactgaatgtggaataaaatccaaacacttcagaaacgtatttaaggctcttcctgagtgaaagtaacattcgagtaacattcaaaagtaacatttatctctcactttgtacatcacactcggaaaccagggcaacagatggttcatgacctacaccaaaaggcttgaccacatcgtgaatacagtgataaaagtgtgtcagatggcaagagccattctccactgtaggttggaccgggtgaaggggagttctgatgcccactggagcaggctggcttttggttgttcactgatgtgcttggatcagaccaataagttagtccccttgcgcatcttttgtgggtatttgggaagacttaataagaattttttgtcccttcactcatcttgtgattattatgtcctttctggttttcttttatttggtgagagttttagttattaattgctctataacaaattaccccagaacttagtggcttaaaacaacaacatttatcatctcattgttctcatgggtcaggaatatgagcaaggcttagctgggtctctggttcagggtccctcacaaggctgcattcaaggtgttggtcagtatcatttccaggccagagtagggagcttagaacttccgtttctaagcttactcgtggatattggcaggattcagttcctcacaggctgttggccaaagccatccttgtgtacttgccatgtgggtctttctatagaacagcttacagggttgcagcttgcatcatcagagtgagcaagcaggaagggcctgagaaagaaagaaagagaaagggagggagacaacaagtgagatggaagtcacagtcctttataacctaatctctgaagtgatgttttgtcagttctgccttattctattaattaaaagcaagttgctaggcccagcccacattcaaggggaggaggtcccacaagggtctgaatgccaggaggaagggatctctgggagctcttcagaagctgcttgtcccgatgaatgaaatggttgtatccgtctattgagcagccagggcatagatctctcattctcctgaacaccggctccttgtgcttataggactttaaagataacacagttttccttggttaacctttcttgcatgacatccaaggacttttttctaattttcttctgcacatatataccaaatagagatgatgtgttctctctcttgccttccaagtaaaaatccacttcaagacataattcctgccttttaggagactactttctagaagacaaatatagaagaaaggtcaaatgtaaggtagactgtgaaatgttaatgaagtataatatgcaagaaagaccaaggaagaaattttgatttgtgattaagaactttggaaggggtgggatttgaacagggcgtctacaaatagtgaagatcatggagttagaggaagaacaactagcttcagggcatggaatgagaaaggctctgagtcagaaggacctgggtcttatctggaagtggctatcatttgcattatttgcactgggtccagtggctgcagctggacgcagagtccctgagaaaatccatgcttggaaactagaccaggaatagtaagctgagaccagaaatgccatctgggggtgtttggactcattttgtgtgcagtaaaagccactgaaaacaagggaatctcgtgttccagataactgaggtggccgtatagaaagctgattatggcaagataccagcaataaaagtcaagtaggagataagtagtccaaatgagagaggatggacacttaaaccttagtagaagcagtgggattagagatgaggagacaggatttacttttcactaaatgtaatatgccatcaatgatgacacacaccatttttaaaaattatagctcatttaaaaaagctgccaattcaatgatgacacaatgctaagacactggcaatgaaaaaaatgcatctttatttcagaggttaaaaaaggtgtacatcttagaactgatgaaatacaacagataattttaggaagatgacatttgcattttggacttgagcagtgtggagggtactgatgccattaataggaatcatgggaacatgggaatgagaaatgagctccaaaagaaaagatgcattctcttttggacatattgagttggctatctctaaaagatattcatgtgcagatgtctggcagactattagaaatgctggtttggaactcaaggaaaaagttacaaaaaattggactaggttaatggatggactattttgaagttaaatcctatgcttcagtataaatgaagacatattttttttttctataaccactatgaagttcccctccccctccaaattatagtattgtctttggagtgtttgatccacattggcagggactgggatatggagaaaggagtgaaaaaaggagtttgagactacaggaaaagtcattagcaattgcacttagaattgaaaatcatgacagaaagaccggtgcagtggctcatgcctataatcccagaactttgggagcctaaggcaggtgatcgcttgagcccaggagttcaagaccagcctaggcaacatggcaaaatcttgtctttactaaaaatacaaaaaattagccaggcatggttgtgcatgcctgtagtcccagctacttaggaggctgaggtaggagaatcacctgggcctgggaagtcaagcctgcagtgagctttgaatgtgccactggactccagcctgggtgatgggagtcggaccctgtcacaaaaaaaaaaaaaaaaaaaaaagaaaagaaaagaaagatcttcatataattgacaattcattgagatatcatatccatccaatcttgtgccctgcagcctctcttatacccctgatatttcattcttagtactagatgagtatattaatttgctctgatggccataacaaagtaccacagattggatggcttaaataatagaaatttattttgtcaattctgtaggttagaagtctgagatcaaggtgtgatcagagtgggtttgttctaaggcctgtctccttggctcccagatggctgcctttccctgcatcttcacgtggtctttcccctgtatgtatctgtgtccatattttgcctttttataaggacactgtcgtattggattagggccccctcagatgacctcatataacttaattaccttcttacagtcactacagtcacattctgagttagaacgggttaggagttcaagatacgaattgggggagggaggaggagacaatttagctcgtaacagtgggttagccagctaagcccttaaattcttattcacgtgtgttttgaatgcctagacttgctagctgaagtctaatatcctctttctgcaccaccacaaactatttttccaaatttgtttccataattattctgtgtctctgcagaggtggaaggttatatatagcagtgctgtaaagcttttttttccccaacttcatttttttttccctttcctgttcccgaaaaaacaaaaaatgccattctttgaagaaagaaaccacttgttctcccttatctttcgttgaacagcgtttagcagaatttgtgacattacatcagttcctcacttttttcccttaggaatagaccttcaattacaaactgtgagcaaaaaatatataatagcaggaaatacatatttcagctgacgtctgactcctttttttccatagttatagcttacctagaggataactttctgtggaactaattcttagcatgtattccaaacccaggtttatagggatttggttgtttgacaacaggaaaaaaataccaccaaatgtatgaagtatgagaccatgctaggctgaaacagcacttctcttaaaacgtgccttcctctggattgtttttgtaggaagtttgtcttggcaagcatttcaaaagaactcgctagacgcctctcttgtaattagctggctttctgctagaatgttaggtctaccttcatctcaaatggtacaaaaattaattcctctctgtcgctctgtccacagtataaaatactagatttctgagtagtttgatatctaatttttcctttctaaaatttaactatattcagtttaagtttttgatttaacttaaacataacattaaaaataggatgattgatataatgttatataggaatggtacttttcctcttttccctcagtgttaaaagaatggtactttttcctcacaaaaacctatatccccagccatggaaagaatatcagacaaacctaaatggaaggatattctacaaaatacccgaccagtattcttcaaaactgtcaaggccatcaaaagcaaggcatatctgagaaacaaggaaagtccagaaaaagttaaggagacataatgattaaatattatatggcattatagatgggatcttaaaacagaaagagcatattagggaaaaactaatgaaatccaaataaaacatggatttagttaatagtagtgtaccagtgtttatttcttaactgtgataaatgtagatgtaccataggaatgtaagatgtaagacatgagttatactgaaactctgcatattatctttgtagctttctataaatctaaaaactattctaaaataaaaagttcacttaaagtaggatgaatgacaataaagataaaagagcataatgcaaggaaactatgaaataggtaaggaaatacagaagttattaataaatattaaatgtcagcctaccacttgatgtatttgtgtcaataaatggcaggataccagtgagtccattggcatattaatccaataaacttttataaatgatgaattggttgtaaacattgtgttttatagcatttgaaaattccaaatggtaactccgcacacgatgcttctgctcacatatttcagcatcctgcttttagaatctgcagaaagaaatagttcatgtcctttagggaggtttaataaaaagcaacaggtggaaaatggattttgcagtagcatgaacagccataaccataaatactagtacctcagaattataccagcagaggactgtaaacacattaatctcccagcagtgcagaaattccattctcagatgtcatctcaatttcaggcacaaagattgaatgcctccatttaaattcaaaacactgaaggaatatgatgatccttttttttcatggggattcatggagtgagtttgccagtttcctcatctataagatggggttgataaatcccatctcagcattgtgggattaaatgagatgatatacataaaatacctaatatgatggatggtacacaggatgttttcaataaatggtagtttactttttattatgctcatgaacattaggatggtcttagaatcccagaactagaagccacttagagatttactttttgaaacattgttattttacaaataaggaaactgagaccagaaggcagtgacttgcctggagtcaggcagcaactttgttccagagttgggactggagtgagtctttgttcctcgggtcccacttgggtgctttttctagatccagatttcctgacagtactgcaaacctactgtgtgctagtggctgacacaaagctctctgcacaattccaatcctggcatctctacttctgaagatgccattccttttcctcagagggaatgggcttctccgcctccctctccaataggtgtggcaatcagctgtcttccagttccctttcactgcatcagcatttcagccgcagcagcctgcttgtggacagagcaggggttggcagtggtgacgactgttttgggaaaggaaatgtaagggcatttcggctgctgtgctggggctgacgaggagcacacaggagagatgcccctcccatctcccagagtgggttggctggagttcattgcggagcatgaggacgtgtgggggtaagtaaaattcattataaaagaaatacatgcttaggggtatccatgatggaaagaaggaagctatttagactttaatacttggtttaaaaaaaagtgactttttattcacttattagtatggcgaaaataatatgaaaattactttcctgtggattcatcttgtcctttgataactgttagcacctgttgcttttaattaagcttttttttttttttaattccctaaggaaagcattgttttttattttccggtatgtggtacaagacacataactccattagtttagtcaaaataaaaaggatttttgagaattttgagaatgagaagcaacttggctgcatttttaagatgtggtccagcagcacatggtgttgtgggggagatgtggctgcattcatggtggggctgcttcacctgagcccctgtcacattctgctcctgactccacagccccctttgctttttaaaaacttccatttcttaaaatgaggaggaaaagaagcaaggaagacattggggaggcagggaggagtctggagggaagggctgcatctccagccttgcccacttagtccttgtccttcatagtcactatttactgcaggccgggaaaggaatgggggttatttctggacaattgtctcataaaatcccgtcagacccgtctgaatgctaaacgttccatggcactggttatctaggggaagaaaattttccttagccaaatttatgaggctgggttgaaaatcaggttgaaacagagcctggcgaatccctatggcaaaatgattcatctttgtggagtcgggaaatctatttttatcacctttattcagccagctcctgattgtgattctctcactgagctacagccgttttcttcatggtgctgaatagaccaaatgtctcaggagtctgaaacttctctcctgccactcccagagtggctgattcagcagtcccgggagaaggggtttgtcctgtgctgcgcgggtgggttccgcacaaggtgaaggtcaaataaaaccgagaggctgcaagtgtcagcagccagcctttgactcaggaatcctgcctgagggtatgtgccactctgctctcctgctctctctgtaaggtgactagaaggtgactgggcagccataactcctccaattttgaagaccttcccaagggaagaaggggcaagaataagccaccctccttacagctgccaatacatctcctcaatctaatcatcgggcagagagggacttcctaacaccgttgtattcattttcccatttccatttagttctgtaactatgcattccaggctgatacatagtcctagctggttcttgctggagtcccaactaatgctgagaggagtggcaattgttctctataataaagtttaaaggataaagatatggaagaagaactcactcttgagtttccttttctaatggattcagcatgcttactctctgggagctataacaaatggcaattaggaaagcaacaggaatgttgactagacaggaacagtgaccatggctgttgggggtattccctgcacctggtatatagtagacactcaataacaatttgggaaatgaatgaccaggatactgttccccataggcttcagttggccttcttaagagctctccttcaggacatagtatgcagggcagctaggagctgacattctagagtgagatggcctgagttcaaatcctggatttgcagcttctcagttgtgtgctgatctttggcaggcaacacaatcgtttgtttcctcgtctgtaaaaatggacataatatagtaactaccttatgtggttttcatgaagagtaaattaattaatataggtaaagagtctagatttttttttcttgtcatgtggttcaagatatgaagaagaagaaaaacaggagtaggaaaagaaggagaaagaggaggaggaggaactttggctgttgggataaatttgggaccctttgagattttggccctgccttttaggttgaatatttccctaaaatcatgattcagtgatttttaaaccttctcttgtcctgtagagagaataatttgagaataaaagaataaaacgggccagatgcagtggcttacgcctgtaatcctagcactttgggaggctgaggcaggtggatcacctgagatcaggcgttcgagaccagcctggccaacgtggcgaaactctatctctactaaaaatacaaaagttagccgggtgtggtgatgggcacctgtaatcccagctattcaggaggctgaggcaggagaatcgcttgaacccgggaggtggaggttacagtgagctgagatcgcaccactgcactctagcctgaaaagaaaaaaaaagaataataaaatggatttcagggggaaaatgatgacgaattattgccaagagttattgaactcctgctccttgccaggtactaaccatattcagtgttgaaacaaactgtcagtccttgccctgatggacgctgcagttgactttcaagggctgctgggcagtgtgaattcaatggctcagcgaacacagctgctacgttccttgttctctaccttttaaaaaggaatgttgagtagatctagaaggatgaagctttaaacttagctcccaacaggaaatgaggagtgaggaagtagggagagatttgtgtgtgtgtggagtagcagatgaagtctaactgtacagcagtataaaggcagtgaaagaaatgtagacgtgggcattggattgaaccatgaaactgaagggaaatccaaagcagtaatgtatcatcaacctgtgaaatgtaaagaagcacaggtaagtagtgaaagaatgaaggaaccaaagcagttgttgtaatgatataaaataagagccatagcttattagacccttagagtcccaaagcccagccttgagagtgtagattcgggaaggctggattcctttggcatcctctcttttcagctctgggtactgccgcagcaggtgagcttgtgtttggtccctttcagagtctggagtctcccatctcttggaaatacaaggatatgtatgagctaccaactcccatctggctttactggtctgtgaaacattctattttaatttggtgaatccttttttgactctagagatcttcagcagtacctgcccttcacaccgtttcctcacctttgccagatctgcttttgagtagcagttttatccctagatgtcttatagcccagacctggtaaatcaccaatgtgaattatagaacaggatcatttttcatcctgctttcatcccagtggctggattaatttttggatctctgctttctgtaagcagtcatttcttccacagcagccatctgtgaagaaacagagcttacgaaatgactggggcatgttttacatggctgtgctcagttccttctgtttgattcccatgtaagctttggcagtgatttccacaagcgtttctgtgggaggtgctggagaatgactttggtaaacagccccttggctattgttggccctttccctgcaaataccataaaggacacaacttgaaaagtcgctctggtttctgagcccctcctagggcccaccccaggtccgacatctgaaaagccgaactcagccatgcttgtggtagagcagcgatgtggactgcgtctgtgtttgcctgacttctgctgggccactctgggctggatgggagctctgaccatagagcttactcccctcccctcattacacatcctgggattttcacactagccctcaatctgttggagtctttttaggtagaatctcatttcatcttcctcgtttccgtttcaggttttcattccaagaatggaatggctggttccattgagaaccagccttaggagttctcagtgtattgattttatttacactgctagtgttacattttgcttttaggaatatggaaaagcttagggaatttttggacatgtgtttttctctctttctttcttttctttttttttttcctgatggccagaggtttctgctctcaaattactcagtcagggtaattaaggactaaaaaaatgtgaatgtgtgaatttaacagtaaaaacttaaaggaaggaaaaaataccttccttataggaagaagagaaaaatgcatataaataaacttgttagaaagagaaaactgatttaccagcaactgaactcccttttgtttcttgatttttttgcctttaaataggctgtgctatttcctgaagttgacccattttccttgcttctgccaacactcccttaagataagtatttataaagtttattccacgttgatatttcaattgtttccagaaatccatcccatcatagcagcttccctactgccagggaacctgacctcagtatttcctgaagtcagaggatggtcttatatgtatgtaagtgcaggtatctacagtaagagagaacaacttgctatatagggctcatatgagtcaacgccaataaattgaaaataagaactgaaaaaattgtaacattgtcctcacattatttttaaagcattatctgtttcgatgctggcaaaactgattatcttatataatggccaaaggaactgttcactttcaagaaataagcaactagcctgtctttgttttcatcagcatgttttttggtgactaatatgttgatttgatgaaagctaattgcacaaacatgcggtttgtggggaagaaggtaacgcatggaactatgtctaagagatgtgggtgttcattccattggtggatccagcactttcttcctcaataaagagtatttgttcctaaaataactggtgtccttcaaggcacagaatgtctaactcagctgaaggtatttaatttatattataaatgtacatatatattttatgaattttaatagaaatatattaatttacatttataagtttaaacataaaaacataaaatacatgaaatatgtttgagtgtattgttagggacatctctgagctcctgtggagatagtgttttttccctaacataacttacatttaagaaaattggatttttcatgaaatttactcaagtaagactgtaggctgagtttaatatatatgacaactaaactttcggcccatattgcaccaaattaaagctttcttctttgtctttgagcacaagaatgaaagctggcatactgtccggtagactgaaatgtgtcctcatggtcattttgaccaccttatgagcatgattaattgacaacatgttgttactatcttaattctttggtctgagtctcagctcccgtgtcagacctctgagtcccaaacatagcgccacagtctgggtcttcacatcttggccaggtttctgttaaaaaaacaaaggcgcctctgtgttatacttttatggagcacatgtggtgtgtatttattttgtgataggtttttatcacttggtagaaagatgttactgtatcttaagtgaacgattgtttcaccctgttgctccacagaccctagttgtttctttaaaatgggcgatggatttttaggggcgtattcacaaacctgccatgaaagtctttcttctccagatgtttacttctatatttttatgtgaaattcaactttttcacctatggacatgcttccctgcagcaaataacatgacaaactctttgcctttatattgtctttatatttcagatacccccccacccccaccaagccttctcaattccaaacctgtgattatgctggatgctttacgtgttatgctccggcttgtaatgggccaactgaaagataaactgctattaaataaatctatgactcttttgagaacaaatagagctgttgaaagagtttaaaaacatagtgactcctcgaaagactgtgaacattcttgaaccctttgaatcaaagtgaattttcttcactctctgtgtgtgggtatacactgaaacttataagaaagaacctcagtagcaagatatttgaaggcttttgtgttcttaaccctgcaaggtttttcttggcaagacttgaagaaaatgtagctgtcgtctattttctgctcctgtcgaggggagcagttgagtctgggaggcctctaatgtgtcagagagaagcctgcagagtagagaagagcccagaagcctccaggtgcccagtggttccctaattattccattacctagttacctggttttctattacctagttacctagttattccattccattccacctcctctccaagcaaggctgggtggttcttctattttgatctcttctcatgtgtctctgttgctgtggagctgcaacatcaaagcctaccccagaccacacgtgtcttctgttgccaccacgtttccctctggacactggatcagccttactgccattaggatgcttatgcttcctagaaagcctcatttatctgtgctggggcagctgctgaggactacacaagattcactgtcatgggtttagctttcagggactccccaacttgcctaagttacctcttgggtccttgattgaaactccagttgccaagtaatgaagatacagaattttgcattgatctctcttcccttttccatctttcctgtttccattctgaaaggaactgctctgaactggcaaatgcctacagggacttcagtgtcataggacaggctactttgactcctttgtataacctcaaagtcactgccaatacaagggtaaaacagattctgttctttgtactcaaattcagtgtgatgtgagttggaatgctaagaaaaacttaagagatatttttagcaaaaatgaaatattttgatgcctatcgctcacctgaaaattttcccagatttgccatttctagatttttagcagcttcacaaaggggtattgtgtttgagtcggaagagaaaaatgtttttatttcctgtccttgacgtttagtggaattgataaaaagcatcaaggatctttgagttctggatctcctgcaaaaaaacacattatgtaagaaaggacttgagtgtttttttcctgttcgtcagtacgaggggagagttactgtggaaagtgaagggcagtgatcatcaggaatggaaaacaaagagctttgctagaaaatcacagcaagggtgatcaagcagttaccctattatctggctctaaacttaatgttgacctcgacaacgacttttacatcctccccccaaacaggctcctttactcattcctgaaaggacactgttgcaacttgagttatagggttgttggagctacctgatgttttattaaatggttatttaatcaataaatgagtgagtgatcatctcttatggttgatcagaaagtattcatttaaaaagtcataggtttaacttttttaaaagtcaagtcagcacagagcttatgtatttaagcagttggaagtcaaaatattaatatgttcagtcaagaatatccatttcgtttcatacttacttggcagtttaatttttttttggccatagtttacatggtccaactgttaggttgcttaaatttgccaatatgaaatattaacattggggtgaatgctttatgaaaacaagaaattgtttctgcttggtctacctgtttattcattcatcaagatttcccaggctctgtcaacagatttctaagcagatatttgatgatatattgttataggaataaaaaatatgttatagaaatagaaaactaccttccatgtagagtagaaagaagccttcattggtctgttttttttgtttttttgagatggagtctcactctgtcacccaggctggagtgcagtggtgtgatctcagctcactgcaacctccacctccctggttcaagcaattctcctgcctcaccctcccaagtagctgggagtacaggtgtgcgccaccatgcccaactaatttttgtaattttcatagagatggggtttcaccatgttggccaggctggtctcgaattcctgagctcaagtgatctgcctctctcagcctcccaaagtgctgggattataggcatgagccaccatgcccagcctgtattttttttttttaataaaaataatccttgggcagctgtttatgttgttctgttatgcttgcctatctatagaatgaaatcaatgtggttttttttctcaactttcttcttttttattcttttttagccccatcattcagtctctttgttcctaagtctttcagatgctttaaccacactattttcttacctgattttctgttccacttagcatgttattccaggcaatgaatgtgttgcttcccctgtgatagattatggcactaaaatagtaatgagctttagtacaatcagagcaaaaattactctcctaggtaagccccattcttcccctagctcaattcagtgttccattagccacagaaatgccaaggattccacatacctacatatatatatggagagagagagagacaagcgagagagagaaagagagagagaggttgagaccgagattgagacagagagagctagttccctgtcaggtctttactactggaagagtcaaagatttgcaaatggagatttttctttgcatcttcttcttcctattatccttttttgtaaacaatgtttattttatttttaattgacaagtaataattatatatatttctgggatacaaggtgatgaggtgatgttatgatgtctatacaatgtggaatgatcaaatcaggctaattaactgtcagcttgctgacttatttctttgtggtgagaacatttaaaatctactcttcacacaattttgacatatacattattatcagctatagtcgctgtgctgtctaatagatcactggaacatactcctcctgtctaactggaatttcgtgtgctttgactaacatgtcacctttcttcacccacctgttacctcctccttagcctccggtaacccccattctactctctacctctatgagtttggcttttttagattccaagtataagtgagatcatgtggtatctgtcttcctgtgctttttattcttaaagatattaactgcagaggcccagcttcatcccctgtcttagccacttcccagcccaaggtgaccttgggctaataatttaagtttcgcattttttcatctgtaaaatgatgattaactatagtattgaccttataagaccatagtaaggattaaatgagctaatatataataaaatatacagatattataaatatatacatatataatatatacagatataaatatatacatatataatatatgtatgttatatatacatatataatagtatacacatatatacatatataatatatacataaataatatataaaaatataaaaatataaacatacatataatatacatatattataaataaatacaatataatatacattataaatacatataatgttttatgatatataatttgtgtgtgtgtatatatatatatatatatatatatatatatataaacagtgagtacattacctagtgcatggtatgtgctcagaaaaagatgactatagtaatggtgctggcaggtgttaatgtcattcatatttttccctaaacctctattttcccatctattaaatagcatagtaatagtacctaactcattaatttgtgaggaataaaggcatatggatcaacgtagcatgttgcctggcaccttataagatctcagtgaatgatgatgtatacttctgcaatgatacagatcattgcacttctcctgtttatctctaccctttgtttaaggcttacactttaatctataatcttaccatgaggccctgaaattacactagccaagtcagtttgagccagtgatttgctttcttcatttctgtttctcatttgtaaaatgcgagtgttgaactgagtactctgaatagtttcttcctctaaagtattttcacaaccattttatctcactcaactcattttaagaaatacctgataatgagaaactcatccaagagagcctctttgcccccgctccaccaaaaaccttactaaactaatctctttagttgttcagtcaattttctcttattcaaaaagctgggctgttttgtttgattaatgacaccatcaactggccctatcccagagtgtaattgatcagtccataattccccaagtcattcttatttcctatgattatatttttaatttataaacccttggccagtttcaccaaaaattaaatcctgatgccttccagatatatgttccaaatattgaggaacagtattcaattttgtctctttgccagtggctgctctcaccttgttccaactcccaaatccccatctcgttttttcctttttggagaagagtcgtgaaaaactggtttccattataattccatcacccctagaggcaggaggactaagtatgcagtgtggtttcaggccaagaacattggactggaggtgtaaagagctgggttgcagtgctggctctgcctccagagctgaggggctttgggcagggtagtttctgttgctttagtccttagttgtctcatttgtggagtgaaagataaaactgaatgattgctgagacctttctacctgtgaaaactcatggtttctattctttcccattttgtcccctactgttaatttttttttttaaagacacttggtctcactatgttgcctgggctggtctcaaactcccagactccagcaaccatcctgccttggcctcccaaagtgctgggattacaggcatacgggccactgtgctgggcctgttaatattaactaccatttatttagtacctacaatatgccagatattaatctaataatagttaacatttagtatgtgctcaccatgtgctaagcgctttatttctattctttactcttcacagtaacccaaaaaagtagatgcaactagtgttcttcttttacagatgaggagactgagacacagggatgtgaagtccgtgctcatgggtatgcactcggtgagggatagagccagaagctgaacccaggaggctgatgccttgcccttgcccttagtcattttattatataacattcttaaggacttcatttttttctttttctctctactatagcactaggaacaatataatagtaccctcacttaaaaaatgaagaaaccaagtgcaatgaagctaaacaatttggccaaaataacccagctagcgtatgacagagctggggatcaaacctaagtctggctcctaaccaccgtgttccaagagcagagtggatttcttacttctgtcacatgtatcttgtgggttagtgataagcaaagtatagtacattttaaaaagaaggatacttttgctttctgttcattaaattttttaagcatataagatagaaattttgctagatttacttgaagaaacagatagaaatcattctgtaatcaacacgatttatatgtggatagattctttttattgagtaagattattacagtttaatctagtttctgtcggatttgtcttctatttcaaagaatgctgtctgaattattaggttggtacaaaagtagttgtggtttttgccattaaaaataatggcaaaataaaaagtaatggcgaaaaccacaattacttttgtaccaacctaataataaaacttggccatgtacccaaattgtaagagacggcaggcttcacccccagtatcctcagtgtggctgccatttcttatgcccactgtccctcatgctgctatttaaaaactgattatcctgtttacaaggtgagactcaaaatttgatatagaatctaattggttaattttatattgtgtgtatgtatttttcctattgattcagtcaacaggtattaatttagcacatgtggcaggtgatcaattaatacctgttgactgaatcaataggaaaaataatttgatacctttagctcattttattctcctaggtatttaaaaaatgagccttctactttcaaaatgctctggagtaaatggctcaaggccatctcatttcaccatctctaggtgcctcaagttggaatcaatcatacaccacttggcctgaaattcagataagagttgacaggaagtgggcaggaactgtttccttgttttttattgtttgtataaatgttaagtgccatggcaacaaaaaactaacagccagatgaagaacagaaacatatggagaagtgaaagacaaccttgaaaagagatatttgaaagaaattattcatttggctcatcttgatatgagtgagtgtattgctaacatgattgattgtgttcctgagtagaaatgcaagcttactaagattagagaattaatgaattaattggtactccttcttattctacaaaggactggaaacataaaaatattaagttatagttgggggaaaaagtaaaagctttgactgtggaaaatatcagtgtaaccaaaagataatataacttttataatcggggcacacactttactctgagtttccgggcagccacagcaaaaaggaaaatatgattaattacaaagcttttagcttccatcagacttagttaatttctcatgaggaagaaagttattcttaacatctaggtttaaaagaaattcctttcataggtattcatattggagactaactctttgattccaaaaattcagaatgtttcttctatctttcttcctccatgataggaaattgatcccattcaagatgagaagtaagtttctaaagtcattgtcaaggcagctgtctaattaggtaagaatacagatggactgtgaggggaaatatgtctttgatccttccagcaatatctacagagttcatgagtttagttgaactttcataattatggatatttataacagccttgccttctattgctaggctcagagatccttccaaacaagtgcatgattcttaaaattttccaaaggagttgctcaggacaaaataacactggtaagacttgcttttctttatatagttgtatcatgaagttagcacttacttttatcaaattcaaatggtcaatactgggcatcttccaggggtaggctgtattgctggcattgggcactccaaggatacaaatacgagatgaaattagagtgtttggatgaagccgaggtcaaggaactataccctgcaggccaaaaccagcctgcttccttttgttcatggcctgtgggataagaatagtttttatatctttaaatggttggaaaaaaataaaagaagaatatttcataatacatggaaattaagtgaatttctaatttcagtgtctataaacatagttttattggaatacagccatgttcactcatttatgtagtatccatggctactttcataccacagtggcagagtagatacaacagaaaacatatggaccacagagcctgaaatgtgtactatttggccctttcagaaaaagtttaccaattcctgttatagtggagaaagtgctttctatgtgtattagtctgttctcgtgctgctaataaagacatacccaagactggataatttataaaggaaagaggtttaatggacgaacagttccgcatggctggggaggcctcacaatcatggcagaagagcaagggacgtcttacatggcagcaggcaagagagagcgtgtgcaggggaactccactttgtaaaaccatcagatcttgttatgagacttattcactatcaggagaacagcatgggaaagacctgcccccattattcagttacctcccactgactccctcccacaacttgtggggattgtgggagctacaattgaagatgagatttgggtggagacacagccaaaccatatcactatgtgttcatgagctgtgtgaagagtctgtaaaaagaagaaccgtcttctcttgtagacagggccctctatctgtgtggtgcatcctttatatctccatatactgatctttaaaacatggcatgtgccacgcctgcatcaggatccatctgagaggaagaacactccagaaggctcgaatcatgagctcagggccaatataaatgccatcgcgttactttggaggctttccctacaggctcttgttctcttggaatcagtgccttttcctgtctcttgcttcttgttctcctaggctgctgctcaccaatccataaaaattataaacatggatatttaaaaattttgtgacacaaagtattcaaattaccctgccactacctcttctagacacttggtctgttctttattaatgctgtccttttttcaggagcttggataaaatagcttttaaaaatatttgctgaaatctgtttgcctttctgctaggctctgcattttatgtccttattactatttgattatgataattttaaagcattatataatcagaagtaagacagactttaagaattatgagctgaaagttcagtttcatggctcatggaagtaatatatatagttatctccttaggaattttaattatttgaggtgagctgtttaaaaaaataaaagtgcaaagtgcttatgtgtttaattcctattccaatccccaaaaatctgaatggagatttataaaatcatgtaattatggggttaacgtgaccctaggtgccactggtataatcagccttccaggcgctacaagaatctcttctctcccttctggagtgatggccagttggtctctgcgagatctctcgcagtgatgggcagctgtctgactcctgatttagttctgttatcatgtgactgtctactgtgccagccactgtgcattcggggttacaaccatgaatggcatggtctccacctttgaggaactatttagtaggggaggcagacaatttcagtttagcatggtaggtgataagatggatatattcacaaagtgctgtgggaacatagaggagggccttaattgagtctacttgggaatttggagaaatcttcctaaaagacttacaggaggtgagtcttgaaggataactgagttcaccaggcagaaagaaaaaggtggtatgtatgttcccagcagatagaacagcatgagcaaagtgtgcaagataccactagaccagtggatgaggtagggtgtggtgggggatgaggagggcagggagatatggactaagtcttgagaatccctgtgtacctggtaaaggacgtgggatccctcttcatggtgattaaaagaaagtggtaactctgaatgatagcaatgaaagaacggaggaagggagcctgatttcaaggggatgttggtgtcagtggatcagacttcatggtgcgctggtggtgacctctgatgaaagattcttgagccagtttcagccatcttccctcttggatccagggactggaggccagttttggcatcctccattcatttttggtttacctactatgtattgcatacctactatgcaccagatcctgcactgttatctcaatgtatagtgacgtaaaaacaaaacagataatatccttgacctaagtgaattctcaagctcagtagtattaggccagagcaagtcaggttcaggagaagctgtggtgtggtggccagctttgttggtttccaagctcaaattcactgaagcctgttcttttcatggttggcttcaatccttataaaactacaattttctgaatccaaagttttcttcctgagagccatttgaatcggtttttccattcccttcttctaaggaaaaggaactattttgcttccacttgtatttaatagatcttccactgtttctctttttgtcatttatctattattgcaattgaactaggcaacaatcacaaaacctcaggagtgtaaaacaagtgttcattgctcatgcatctgagatggctgaattggtggctctgctgaggttggccaaggtgatgggatgtgggactgctccacatacctctcttactctggttggcaatgccaggcatgtgctcatgcttcccaattccttctgctgtcacctatgagatgttgtttctggactattcattttgtcagtatttcttcctaaaatgtgcactcagacctgtacaaccttcctctaggtgtggtctaaccagtaaaaactgcaggggaaccattatttcctatcctctggacacactgcttctattagttattaatttaggctgagatggcattagcttacttagcagatgaattgcacagttggccctcttctcacattaagcttgagaaaaataaaacttctcagatttttgtccatatatactgctgccaagtctcatccatcctgtgaaaaaaaatttttgtctttcatgcctagtccttgaaccgtgtcaattgggttttgtaaagggtctttgaagtatgtcttgaattaactaagttcattcattcattccataaatatttatcatgtccctattaggtgtcgagcactgtgcagggaacaagacatgaacatagtccttggtcttgtagaatttgtgctctacttgcagaagggtagggtggatgttgaagattcagtagtcaggattaaaaggcattatccactttgtgacatgtttgttgccatggagtcttctccattctttttgagaactcctgtagttgattaaaattccagtcattgccatttgattgatatttggggttttgctgagatgttgacacatctgctcgaacaaggcatgaatagttagcggatgtgaaaactgttcacaaattgcaaaaagcaggtttctgttgaacgttatgaacttgattgacatcacactcagggtggtgttgatttagcaagcgtgtcctactgttttcatggaaagttcaaacatctttcccctgtgccacttgatgggcataaatgtgaaggattttaggcaaaagagcatgcggtgaatactgaagcctatcaaagctttctgtcactcacaactacatggtatgcctatgttagagctagttgaccgccttccattggttctaaggacacttggttagcagtgtactgggtgttgccctgactctaaagctggggtgtgagtactgggaggaagcatcacccctttttgactaatccagcattcaaaatgcaaaacaaatctaagtgaagttctttcattcattcaacaaatatcagaaaatcaccaggtactggaaattgatcagcaggcaaaatgcccttgaggagcttatcttctaatgagaaaacagataataatggtaaaacaaacaagaatttttttttcttatatggttagaaagcaagttctataaacaagggtgtaaagtgctgaggtgaaagactgtagagtgttattttattttattttatttttgagacggtctcattctgttgcccaggctgcagtgcagcggcgtgatcacagctcacaacctcgacctcccaggttcagtgaatcctcctaatctgttttctgagtagctggcaccacaggcatttgctactgtgtctggttaatttttcttgtactttttgtagagacagggtttcactgtattgcccaggttggtcttgaactcctgggctcagggggtctgcctgcctcagtctctgaaggtgttgggattacaggtgtgagccaccacacctggccagtaattttaaatagagtggttggcagagtcctcattgaaaggtagtatgtagagcagaaatctggaaaatgatctgaaaaaagaagttagccaaatcccagcactttgggaggccgaggcgggtggatcacctgaggtcaggagttcaagaccagcctgaccaacatggcaaaaccctgtctctactaaaaatacaaaaattagctgggcatggtggtgcacatctgtaatcccagccatttgagaggctgaggtaggagaattgcttgaacctgggaggcagaggttgcagcaagctgatatcatcccattgcattccagcctgggcaacaagggcaaaactctatctcaaaaaaaaaaaaaaaaaaggaaagaaaaagaaaatatcataacatgcagagatgactgccagtgtcaaggtccctggttctacctttttgatcattaactctgctattaaattagctacaagtttttgagtgccctgatgtgcccagacactgggcagtttacatctattgcttggaccctgcctaggaagtacattatattacgcctccccatctacagtggaggaaactgagacttagatgaattaagtcaagccccatatcttaagcagcagctgagatgggatttgaatccatctgactttgaattcctggaagcctgagcatttcctcctgtcttgtggcttctttcagtatagacataatcttgataaaaacaaactgggaaattaccctttgaaccaagcaatttgaggagtgtttttgaaactaagagactgggtttctaagagataaaatcatataactgctgttctttaaaattcaccacaggatctactttttccaagaaatctcccctgaataagggaaggtatttggcatacagcatccagctaggttaatagagctctttatatagcctatctgctattaaagcagccattcgacacagaattctgtttattttaactatcattaatggccattccaggaatctatctctatttctttgggatacaaaaccagttctgtatcgattgcttgacaatcttgacacataataaatgcagaccttccttgtgttctaatgttgcaaattgtatcatcctgtgggccgttgtaaaatggttctcatctttccatagcatcaataccaggatggaggagttgcctccatttataaggactaggcatcaagtggtcatcatgaccaacaatgtcataaatgcaaagataaatgtaaaattacctttgaagcttcgtaaaaagggttatacaagggagcctcatgtactagtgtgcataaaacacactaaaaatatacctaactccactctctcatacatttagagtttacaagaatcgatggaagagatgatttttaaaaaggtatccagggaagtttaaactgatgctttttcttgcaataaatagatctaaatcaagcaaagatgttaaaatgtgtgtgttttaaaaatctttattgcctctgtgtgtgtgtgtgtgtgtgtgtgtgtgtaattagaatgatgaggagaattcttaataaaggtggcctggtgagcagacccagcacaatttttatcagtgaggtgttaaaacaccactagaaatttaaggtgatgagggaaacttgatttaccagaaacctctcccgacactgcatggaaggaatccttacctaagccacatagggtgaaggtgttctggagggttggaagtgccaagggcggttctaaactacactctagtgaaggtggctacaatcagtgtgggcttttgtgggggctttaattgtgaggttaggatctgaataagaatcctggagagctgactttgacaccaatacacacttttttttttctcttatcctcatgctcaactcaatctcctctgaaacttgatgtccaacagctaggttttaagggttgcagattatctaccttatcacagtggccacacgtgtcagcctggtgatgatggtgtttcacgttcctcaaggacccctcacggtgcctggatgtcagtttgcataaagctttaaataaagctgctccgtatacatcagcccaagtagcagccacccataaacggtgtgtgctgtgcttttatgtcactttgacactttggtgacaactcttggaccatttcactcttctctaaagagtcataaaaactgataccaacattgaaaaaaaaaacttcaaagtttgtctcttagagttgtaaaggcaggaatgagatgcctgccttagatcttatgggaatttcaccaaaaaggggcggtgtataggagggtatcgtttaagccactggctaaatgaatggtttaaaacaaattaggcagtaatgtctgattatgcttctttccagttcaaaatctttgttggttctattccccagcatgttacaatccatattcctttccacagtctgcccagcctcatatcctgtccctcatttctatttcctccacctcccaatgccattaccgtcccagcccttccctcatcagagaagaggcaaacctgaagtcagccttggagacccagctcacatcacctcactgaagccctgttaggtgcttctgagtgggttcctgtgcccatggtacagtttcctacgatgatgtcaaccatattgtatttatgaaagatgcatttgtgtatttccaccttggtacagtaaattttttgaaatttagagaccattttctatgaaccccttcagcatgtggcataattctagctcatgaatgattggattgatgctataaagaggagggttcctgtatataatctcagtgcaagcagagcttctttctttgttaaaactgttggattttgaatctcagcagacatgtcttcaccatctgagattatgataaatgtttgacttactaatgcagaaatttagctttgagaaacacctacagatttttgtttggttttgtattatccaaaagagcattgtcttcgtggctgaaaaaaaatattttatctggtttggcagattaatttggcaggatagagctgggctggggattatgacaatatatgtggaaggcaatttatgttgtcttttaaatacagtactctaagaattgtagatttttaaataaaatatccttgctgtttttgccccctaaaacataataaagataaatcaaaagtccagcttcaagttatcttacaggagcaccttcaatttcctcttctgtcttagatgttccatgtaacctgtgtcctgttctctttcccaaagttgtaaaggaagaagggtgcctcctccctgtcttgatcctacttccttcaagaatcttctgaaccaagccccactattatagtccatctctctcacattttcaacccctcatcttaccatcagctgctacccttcagtctacaaacctactaagccctcttttactcttaaatccccctttcctgaacctggctgcatcctccgactcccgttttcttcatcctcttcttcaggtgcaactcgttgcaaaaatagtctccatttacatcatcatccctcatcatctcacatcttaagctcgtaccagcctgacttccactgcttcatgggattaaacctactctcagggtcactaacccccatcagctacctcctatgtgtttgataccattggtcagtcactacctgaaattagctttcttgttggctgttgccacaccacagcttctagctctcctacatttcctttatatgcaccctacccctacccaacgcagatatttcttctggttctgtctttgattcttgtgcacctctgtctatcatttttctcttgacaactctgcttgctcttttcttttaaaccactgtctacatgctaaggaaccccaagtccatatgccaaaaattcccaagtctctattgatagtcccgatctctttccagggcttatttccaagtactacctagacttcttttcctgtgttcctgacaatttctccactttattctgtccaaactgtccaaagtgtaatgaatcaaacaacccgttcctccatctgcattccttatttcccttaacaccttatgtcctttattggcagcacaattcttatagccagcatcctggaagtgttcccagcactcacccctccatctagttgttccaaagttctgtagattctaagtccacactctctcacacacacatctaccttttcctttctattcctcctggcctttgtcaaagctcatgtgtcaaagcacagtggggattctgtgactctcctgccctttcactgcagcaatgaaagacttcaaattcctgcagaaggctttcagggccacacaagtctgactgtcatttaccttatataagcataagggcacagtggaaagcagcactctgttaatggtgaaaatctaggcttctgaagtacatagacatgaatgaaaacctcagtcttcccctccctcaaatgtgcttgcttctctctaagcttcatccttgtgtactcccctctctattgtcttttttgggctttggttaaaaactcttctgaggctgggcatgatggctcacgcctataatcccagcactttgggaggctgaggcaggaggattacttgagcccaggaatttgagaccagcctgggcaacatagtgagaccctgtctctacaaaaaaaataaatcggtcaggcatggtggcatgttcctgtagtcccagcactttgggagaccaaggtagatgggtcacttgagcttaggagttcaagaatagcctgggcaacatggtgaaaccctggatctacagaaatacaaacatcagccaggtgtggtgcgcttccccatagtcccaactactctggagtctgaggcaggaggatcactttagtccaggaggtcaaggctgccgtgagccatgattacagcactgcactccagcctgggcaacagagtgagaccgtgtctcaaaaaaacaaacaaaccaaacaaaccaaaaaaacaactattctgattctttcccacctcaggatgtttctgacccatgagaagccccaaatgctgacttggatctgtagaagctgccaggctctttctgaccttgtgttgtttaatccaacctaaatatgaaaggaaaagaaacaatactgtgctcacacacatttaaatgttttaaacattattctcccttcctttctctccagtttagaaatgctgcacataaatttagtcttgcttccttggctgtatttttttccccctccagaactgcatggatttttctgtaggtgttagaaaatctagattccaattaactttgctgctgattactttgtaaatcttggtgagtcagggcttgttcgtaaatgatgatgaacattttaaagttctttgagcatggcgatgtgtgagcagaatacagatgaactaattagaatgtatagtcgctgctcttgtgtgataggttttgagaaggctgtaaataaacatggggctttcaagtcttgtttatggttttcaagggggaagtttgtgtgccttatctcatatgaaaaaacagtttacaaaatttctttaagtctctcttgctcttcagttcatattcttgggcactaaaatgtggacaagtaccatgggaaagaaaaagaagtggatattctgcaaaaattccactgatgttgaagaactaaattcctactgggaatttgatcaaaaagagactaggggaacagcagaatgggaaaagtaaccaacaattctattctttatgcctcctaattacaccgtgaagaaatagacggatgtcacaagagcatgcacttcagtaaacatttgcttgaaaatggtatttaagaatcctctgaaatctccccaaaggcctctaaaaagccttctctctagagagaattctgattataaaacattttctgcacgtctcaccctctttcataggcagtatcattattgcttgtgggtttggggctttattttgcttctgcctctgttacgagcctctgagcagtgttcagaagtagccaaggtaccctttttcaggtgttcctggtgccagggccagatatgggcatgaaagagtcacagtcctgtcctacttcttttgaaaaagaggcccatcaacctctctccactttgcatgttcagtttccagttacaactttctgtcatcctttttgcttccttttaaaaattttatttcaccattagtagagtgattggggtgtacgagttttccttactttcccctttctagtgtggtgaggatgagtcaggctttctgagtggtattttaactttcccttgtctcctgtaacatttgaagaagtctgagagaatgtcaattagctaagttcctatccagaaataaaaggaaaagtgtcaataagtattggtagtaggataacaattttggtgcaatgctgagacaaaaaggaaattgtttttgacctgtcatgagaattagcatgggtccagtcattctgtcccaaaataaattaatttagactttaaaaattgtgctgattagatagcaaaatctgtagcaaaattcaaaattgttacccctagtatctggatggctacatagtccactgtggcaatgattattggtacggaaatgtttaaaataggaaagttcaggctggagtctggaaataagtattgatccctgtatctcccttctgtagggctaaggatttgacagaattattaaataggtatttgggtatctgcaccaaggagaaaaatattgctctttctgggtcatgggggaggggtgatttttgctttcccttttgtcagaactgataaatgtttgatagaaaagatctttggaatgacacaatcagtgagagtacactgggcagaatgttatgaaaggatttgattccccaattatagctttttaactagattaaatcaagcagcatcaattctgaagatgggtctattttcctctcccagtggaacactgcaaaggattgtcctgtaaacttcaaacactgtgcttaagttgggaagattcatcttctgttattaatagttgaaggttcatagcataaaccgtggcctatatagaccttggcccacatctctgtgccatcaccgaccagctctgtgatagtgtacatgtcacagagcctctcccatactcagtttctttgatctgtcaaacttgatggtaatatattcaagagattatggataaaaggggatatatatgggggcctgcagtgtatgcacacacagtaaatgctcagtaagtgctacctgttaatgtctttatcctgacatccatactctaggtatgttattctcttccagggatgtatctggagcatagataatcagaaccccgcaaacagcttgtaaaatgaagcaagtatctctcaaaattaagtaagcagcccagatacttgcaaatggattttagtatttttcctacacaaaagagtagaattgagtcatttatagtgatagatgctaaaaagtagagcaaatttctttcctccattgtcctgaatttgtagtttactgagaaattctgggaaacccaatataccaatggcatgaaaagcaactgtgctttggagaacagcacctccctctacccatcctgcaaaaaatgaacaagtattgcttgtgaatgctttgcatgacaatgccctctcatttttccctacaaatcacccgccttttcctcttagccaggtattatcagattttatcactaaagtcctaatatatctctattagagatgaaaacaggagactataacattttgcctacttcttcattcttggaccagctatcagaaaatttaccatcagggatctcctgtcaaatttaagtcaggagtgttggacttcttagcagtcctcttctctccatcctagagcaggaggatccgtggaactgtgttccccctctctgttttacacttcaggaaattatagaacagcatggttaagtgacttaccctaggctcatcagccagcagataatacaatacctaatatttacttagtgctcattataggctcaaagctctccttatgtactttgtatgttatttcaattacttctcataacaagtgtaagaagtatagataatatgattgttcccattttacagatgaggaaaggagcatgggaggtgagtaacttgcccaaggtggtagacctggaattagaattcagatagctaaatccagaggcttctctcacccatttgctctggcggcagaagagaattcacattgaggctatttcaggttttcctggttcccgtgaaagcattattgcttgaggttattataatgaaaaataaaagacacacttgcctgctatttgggaacatttatttagtaaatacttattgagtacatagtatggttaagggtctgtgcttggttctgtgggggaatacaaaagtaggcatgattaatgcagcatacattaaacccgatatttctatacagaaaaaagtggatatgatccctgttttgtcctcagtgaaattaatgtatcctattccagaaacttcccagggacttccatagagttagcatgactgatgtcagttctcactataagccgttgagtctaggaaatccaaattacctgaaggataatttgtccctacaatatggtttggctctgtatccccacccaaatctcaccctgaattgtaatatccccacatgtcaagggcaggatcaggtggagataattgaatcgtggaggaggttttccctgtgttgttctcgtgatggtgagtgagttgtcacgagatcttatggttttataaggggcttccgcctttactcagcactcatttctctctcctactgccctgtgaggagtttgccttctgccatgattgtaagtttcctgaggcctccccagacagccctacagaactgtaagtcaattaaacctctttcctttataaattacccagtctcaggcagttctttatagcagtgtgagaacagactgatacacccaattaaaaacaaataagagaacaaactatgaataagcagtgtcctcaaattagaccttggtaggttgtgaaagtgatgggacactgctgttttgccagtgcctagaagctcgtgggatattggagtggttttcttttctagttgtcactgttctgttttaagcaaggatcagtcatccaagccaagatctccttgctttatgcatagtgattcgagggctctctgtcatgggttggcatcttaggaaagatagttagaagttagctatttcggatacacacacacacacacacacacacacacacacacacatacacacacacacagacacacacacacacacatatatatgataaattaaataaatatatgataaatatatatatgagataaatatatatatatatttcaaactagtgtttgttgtctgttttcattgttctggatagagtcttatgattttttagaatttcctttgtctcctggtaaaaataacacttagcttttgtatctttctctaagaagaattccaagatgtttaacaatggtccaggtacttcttaccacaagtatgcttggactggtgaactattaggtccccaaattttaggggatctgatggttgagagagggaaaggtgggcattttgactgtctcagccttggcactggagttgtgatgtatgtggttggagcttaggaatctgttgctgctccacctgtgccaccctgagtctggaccagggtaggtatcccatcccaatttgtgccccacactctgacagtgtctaagatgatgctgataataaccactacaagcaactaacatttggggatacagactgtgtactaggcatggcactaagctcttgggaatttcttatttaaccctgacaacttatactgtagatattcttattcctgtttcacagataaggaaacttgtccacgatcacaaaattagtaagacagagccagagttcaaaccaaagtctgtctcattcatccctgaactcttaaccactaaagtaggcatccctagtggtgaagacactaaggtaggagtcaggccatatgggtggtcatgtcacattgagcccctccacatcatctatgaggactggaatcaacttattccagactcttgttaatgttgatattttgagcctcccccaagaatcacaaatggtcttaatggcatctagcatgatgaatcctttccagaaggtcttcaatttgctttgcccagatccatcagaggaatcactatctatggcagctatagccttacaaatatatttcttagataataggacttgaaaattgaaattactccttgatccatgggctgcagagctttgagtgaggttttgaatgtgggaaaggctttgaatgtggggaagagataggcctgggggagacatgatgaaatatcagaatactgaaggacagttgggtgaaagagagcctcagcatgatgtaggcagtttcctggaagtatacttagaaccaatgaggagaagtcactaggagcatcaacatgttgatacaatgtaagaatgagttttctatgataactatgtgaagtgatatgctaatcattctacacaaaatcattatacaaaaattgtataaatttaaaatgtagaatgtgatgttttgataaacatctcatcatacactttatacaatttttatttgttaattataccccattaaagctgggaataaacttaaaaaaagaagagttttctatcacatacagagttatccgaagatgggctgaaatgcatcagaaattgaccacttccttgttactgaagtctttcaagcctagactgggcagcttcatcatgaggactgaatcattgtcaatcctataattctttgatcccaatcagcagtgctcttataagtgcccatcagaatacttgcaaaacctacctgctcaaactcctctattcttaaagctgttcttcctttcaccaagttctgagaactagcaagggctctgcccagtggtgtgtcatagcacagtacaaaactgatgggtctgcataagaaggcagaataaaggatgctgaggttaagggggggacctgcttggatttgaaccctgtctcgtcacttgctgtgcatacatgctgaagttactctacctctctgtgccttggtttcctcatatattatgctgtacatgggataatattaaaatgaaagtgtttttaagattaatgagataatacatttaaagccctcagaacaatgcctggcatgtttgagatattcagtaagtgtttttgttggctttataagcacgtcagcaaaactttttttaacttttgacttgctctcagccaaataagtaaagtatttatgcaaaaataatcatgacaaggtcaatagtagcagcaatagtagtaatatatgactgaggcagaattaaattccagagcccatacttttaactacctacttagggttaggtactgagttaggtgctatacttgaattatctcctttattccctaggaaaacctggtaggtaagtgttactgcattttatagatgaggaacctggggcttagacagattatgtagtttgcccagtattaccaataagtgcacagaaaggcatgattagaatccaggtctttttgtgtttatctttggaagtattgctacacttgtttggtagtaataaatagctctttttttagaaatcttgtgcttaagtggcatcagaaaagatgataagttcatttcacctcccaggtaatgtccttaaaattggcagctataggccgggcgtggtggctcatgcctgtaatcccagcactctgggatgccaagacaggcggaccacgaggtcaggagttcgagaccagcttggcccacatagtgaaaccccggctctactaaaaatacaaaaattagccaggcatggtgaaacccacctgtaatcccagctatttaggagcctgaggcaggagaatctcttgaacccaggagacagatgttgtagtgagccgagattgcaccactgcacttcagcctaggcgacagagcgagactccttctcaaaaaagaaaaaagcagctatgacggttacttaaatgggcagtaaaatggcatttgaggaataaatggtcaataggatccagtatttacaaccataattgatagtgaaattacagactcatcactaagaaagctttcctatcactttacaataaattgtgtaatctgaaaataattttaaaacaaaaagttatcaaggtccagcttcaggagagccaacgtgacagctgacctgatgcaccggagttacaacacaagaactgttgcattcccttgcaatggtgtgtcatgggtttgatccacatgcacacagagtatatgtattgaaaacagtggtgacataatgttctacttatttttggatctagatttcttcaaaaactaatgcgagaaaaatactctaaaatggatgatttcttctggctatccttcagaaagactgaatgagaaaaatatgatgctgctaaaataggccaaaatgttgatgaaatgtctgtggatattggaggatatactcaaatgtaaattgtctcctttgtcataaaataaggcgaggctataggtcgaggtattggcagttactatgaatagtaaataaccattgaaagattgcttgactttgaaattgattgcagagataaacatttaaaagttttctctcaaatttctagacatgttatttacctctctattcaggttatgtggcccatctttgtgcattggcagtcttattacattttttcttctctttttttctctttgtgtttttagtctgtcattctcttgatcttctacatatggtgtaatgaaaatatgcacagaatgtaatcaagaaatgtctcatataattaaaaaaaacaatttagtgcttcttaacattgtactaaatagaaattaccaactgagggaaactgataagaattgactgtgtaaatgcctacacccgaaccagcatagatattgtttaataattggttttgtttctcatgataaataatgctgcgtgacctgttaccccacttgagagatgcaggagttagagatcaaaatgctcgctttcttaatgagaagagctcaattgaagacttcggtctgtggcaagggtgcctgctgcccttttagcctgaacgaagccagacttacccactcagccaccaggaagagcccaccatgcagttctctcctgtaggggcagctcccgtaaaacctgtagtatggagtggaagagaaagtgcacattttgcccgaagttggaggaagaggcttggctaaacatgctcagttccttcatcactcagataccccatgagcaagagggcagaaaaatgcccaggggttatgctaagggagcttcctctacttggaaacgcgaagtaaaagaataggagggtcggccctcaacagtcaattaggagatgaggcacagctgaaatctaggacctgttttaaatctggctgaacacattagctatatagtacctgtggtttccaaatactatagtaaatatattgtatgtactcggattactggagatgcattgtcaaagtagtcaagtcaaggaccatattcaatattgaagtgggtttcaaagataatgaaacataataaggactccaaaaatgccactaaaagcagattctcaatattagctgtgcatcaaattcactttagttcactgaaaaataacctgttgattaaaattctgttcctcgtcatcatcaggaaaggatttatgctttaaagttcctatgctatttaatctattttgcatttctctggccattgtgactgaatttctctttcatgagtaaatagataagactaaatgacagccatttatagcatcattgctgaggacacagctgagggtctgcccagcatgaaccacatgtttgcagaatggttggtggacagcaggtcccagcgtgggatattaggtatgagtgtcaccatgtgtctcagtaacacagaacggtatccttggcaatgtactctgtgacctccacaaaacattagatatgctgcatcagcttgactgctgaaaatagtaagcctgcctggcacgcataattctgtggccattctgtgctttaaccagtagtcttacagcgaagctctgacctgaggcattctgcttatagcactaacaaaactttgctttccaaggggttaaagaaatactttcaaaacatgtggcctcacttccacttaattgctgtagggactctctggtttcaacaggagcctttgaatctgaagtttaagccttgcttttgttctatcagccctcttttccttcagtgatatgttttgcattagcgttgcagtggagtagacactagcctgtattgattttggtttgcatgcttatgctaaggcagaggtgttaattttgaggaagaatgaatcctggtttggacctgtgcacttgaggaaaggaggaaattataatttccaccatctgtaacagtggccctgctccgaacattttgtggcaaagaaatgtttagtaggtagctctgggcggacaagagggattcaagaatcaataacatttaggcaaaggttaaagacagaaggatgaatggcaccgcccaacaaaaatagactgatgagagttattggccatggggtgtgacttggagaaactgtcgtttaaggattgggggagaaaaagggactcaggaagaggactgagaaaaagaaacagagaaacagtggaaagtggagcattctagcatccatttgaaggagagtgcagaaataggaggtaatgaactgtgtcaaatgcaggtagagatttagcacattgcaagaactgaaaagtgtcccttggattagcaagtaaggaatgattgttgaccgtaagaggatttgtaccagatggtgagaattgaagtcagattgtgagggggatcaaacaggaggagagaaataaagactgtgattatgatcaactcttgtgggcaggagagctgagaaagaagaggagagaatgtgtggctcagggagccacacagtccttggaggactgttcgttagggtagaaatgttttttgtcttgtttataggacaaggagaagactggtgagaaaaagatgaagacagagacagagaagagaggggaaaataagtgtgaagtcttggaagttaggaagggatgactttgacaaggaaggagagacttcttttgtcctcggagcaggggaaaggagacggaacacaggagtgtataaaaaaggaatggagtattgacagtgccgtttctggaggccttgactttctcagggcagcagcaggcaaggatgtctgagagtaagtgggaggggtgtcacagagagaatatgaagagagaagcaggaggttggatttgttgttgaggggaatgggataaaattatggcctcagtgaggactcagctgaatttggaaacaatgaatttataagggagccaacatgttccactgggtgatcaacaggttaaaagtttggtgtgaggtccaagaactagtgcattttgagggtgagcaagagcctgatggataatgtgttcggccatggaatatgatactggattatctacagtatcactgcaggtaatgacaagattcaaagtgggtctccagagtggtgtggtgcctggcctcaaaggaaggggaagtagatggcttttatagggtttgatgtcaaggatgtcgaaaaccattgccacctcagaaacctttattcttattaggtatttaccagagcctgaaattccttgaggggtgccttatagcaagcagcctttcatttatagtaaactggaaatatatttgagactggggatattttaatctccaatgatttctacctaagcgtgaatgaaacatgaaaggagcagttctaagaaataattattggttggtttgttgataggggtgggagcaaatggagaggctgagatgggcactgagtatgagaaaaagaaacgttagctgctgagctgaattctgctttgtcaaacttttctaaacactgctccatctggaaatgtaacacaattaacaacatcttcacagatgcaagacaatgatcttgcaagtgccccactcaaattattattataagttgtatagagatacacacagttcgggggtttagaaaccacagagaaacaaaatttgacgattggcaatacattggatttaggggaattaccattggatttggttttatattacattttagtgtccaagattgcatattttacaatactagttttttttacttaaggaaagaaaatatgagacatcttaataccaaaaggaaaattaagagtggaatttgagtgatgtggaatttgacagtgaagtaaataaaaagaaggacctctgagataagattttctggcagaaaaaagcaaggctcttagtagcaaattttaaatgagtaatggtcaaggaaaataacgtgaaacagattctctcataagcttggatgagaaaacacagaaaggaataatgcaaggtcaggctgaaatgaactgtaattagagtctgtgaaatcgcacaaccagagtattgtcacatggtgtttgtgttttgatttcagtatcttggcagttagataggacctagtcagtaattcttaggtgggttaagaactttctagacataaggcaacgggaatgaggaaactgaaagaggagtcagacgagtgttcagaggaggcaggcacttcccaaaggctactgctattcagtgacatcacggaagtacctaatttagaggttcttagatcctcaaaccaagatatggttatctacaggaatgggacagtttctgcattaggggttatgtagataaggaaaatctccaagtaatgttagccagtgtaggactttcagatcttctccaaaccaatgtatggcaatcagcctctcctaccaaaacgatggctttgaagtttactgtcgtgtctcctctttctatgcaccagtggtgatgccaataagcagtgaattttcagacaacagaaggcaagagaaaaatagtccatgtctaattggcttggctgtcactggaaaaaaccaatagctgagaaagtcaacagcatcaacaatcaatttagaaaatcttttttaaaaaatcattgccatctttttctagatttaactatgatatgtaatcactatgtaaaaataaaaattaaaaaatatataaaggggcaaataaaatcatgcatagcagtccactcagagactgttagcatttggttgacattcctctagtaatttctctgtatgttgatatgtatgtaaatgacatggttgaggttacactgtgcatcacttttccagccttcattttccctggaccttgatcatgaggacttccgtatattgttaagtattcttcgcaaatgctattttgatggctgtatacccttttcccacatcaatgtgcaataaattgcttaactgcattcctgttgctgggcatttgggtggttgctatttttaagctactataaatcaacttgtgatgagcaatactgcacataaaccttctttttttcctgatcattttttaggacaaattcccagcagtaaagttgctagatcaaagaaaacccacatttttaaggtttttgagacgtgttgtcaggtcctcctcataaaggttgtaatacacactttgcatgtgtaaagtattataagggacccaaggggagatactggattataaaagccaatggctattaggtcattagcttaaagagctatttttaaagttctgtgtcctggacctttgccataagctcccgtctataatacaattaggaagacaaatctctcttatatgccatctgtgagggaatttgtgctaaattattcaaacaaaactctttcctataatgcaaactcaggcggcaggaaatatcatgggttttgttgaactaggtttattccaggcagagcttaagtacagaatcaggtgggatctggcaggggtcatcaagtaaaagtctcagaaagataaaatgtgttgaaggtgtgaagaggaccatcttgattttgacttatatccttgaagatcccctcccctcccctcccctcccctcccctcccctcccctcccctcccctcccctcccctcccctcccctctccttttttgagacagaaccttgctgtgtcgaccaggctggagtgcagtggcacaatctcagctcactgcaagctccacctcccgggttcaagtgattctccagcctcagcctcctaagtagctgggattactgccaccacacctggctaatttttttgtatttttcatggagatgaggttttaccatgttggccaggctggtttcaaactcttgacctcaggtgatccacctgcctcagtctcccaaagtgctgggactacaggcatgagccactgtgcccatctcttttcatattttaggatccagactcatccctgggagacaagcacaggctacaaacctatcagcttaaccatcatccctgtcattgttttaatgtgttgaatgtaagctattaagacttcaaatgtggctcgagtattctattacgctgtttgctttttgctttctggaaaacatttatgagactgtgtaagggagcgaaataggttgggcacttgggggtaggtttaaatcccatctctaccacttgctggccgtatgaccttggagaaatcattttaccactctgagctttaggttttaatttcctcatctgtcagttaggaaccactgaattcatcttggagggctgttgtgagaatgaaaagaataatgtctgtgaaatactcagcacaatttcatttctatggctttttaaatcctactgatgcactcccaattatgtgaaatcacacacccacacacacacacacaatttattgaggcatattttgaagtagcaaatgattggaaacaacctgtaacctctaaatatctattggtagaagactaatgtaattattctgactagtagctgttgttaccatgttaagtatgaagacactgaccagatagcatttttttaaaagcatcgctgatttttaaaggcattgtgattgagaaagtgctgttttacctgttagctctgtattatttcatcaggtatggtttgaatgggtaaatatctgcctcaccgcaaatgcaatcattcagtaaatatttattatgtgccagcatggtgctatagtttcacaaacccattacaagtttgaatttttttaaactggattcattcaggggtgtattcttttggaaataattttcaaacactgtttcatcatgcggatatgacattctttagaaagtgctcatagaaatcttctgtcatgtttgagaacactctgtacttagtttgtaactacttggcatacaaatttatatgattgtatataaagctcatatcaggcgcatcttgtgagtagtaggaagatgtttaaggttagggcctaaatatatgagatttttaaaacacattttggcaagtgtgggttttattttttatatgtgaaaggagctgtgtctttttttcctggagcttaaatacatgaagcaggaatgtatctggtggtagtagatatttgcctcttgcaatgttgagatcgcacaattctagcagatactcccagcctgttgatcttataggagattcccctatactttgggcttcaggtccatcagctgtaatggccacagttggtactacaatagctgcctctaagtagaagaataacctttttggaactatttgttctccaagaagaaaaaaggcaggtttctatcagccatttgttgtcatttattgacttcaaatgaaaactaacttgcctagttggacaaaaagaagaatgtgtaagatataaaaaggggatgggatgctcacagtgacattaataagcaatacatttacaaagtgtttgttagttcaccgtctgcataacctgttgatttgtgcatatttcttgtgaggtttatgtttgtttttgaacttctatttgtccaaatacatttgactttaattatttccagtcttgtgtttctgtatgtgtttatgatcaagaatgctttaaacttgctcaatatacattttttcagactttttttaaatttcaaaagtaacttattgttttatcttattataaaggcaatacttgcttatgtcagaaaaaatgaaaatggtgacaacctttagggaggacaatttggaaatacctatcaaattttaaaaatacagatatcctttgactaagcaacttctcttctaagtgttataatttacagatacactcccatttatgtgaaatgacatgcataaagaggttttcattgcagcatttttgtggtagcatgtgattaaaaataacctaagtgtccatcaacagagaaatggtaaaattagttgtggtcatttatggttaggatgatcattcatccaggtttggcggggacagtctttgtttatgtctgttctgcagtagttaggaatagcatgctcttccctttcaaaagtatcttgatttggccagtaaattttgtgtttagcctaatttgagtgtagtcttactatggaatgccatataataatttttttaaatgatggcattctttatcttatctttgactaattaaaaaaaaagcaagatgtacctacattgggttttaaaatattaaaatatggaggaggatgtggaatacatataaggagattcataagcagaattgactgttgataatacactgatatgcagattttcttcagtaggcccactgcatctgagcgttctgcatgtgcaaccaaatgcagataaaaaaatacagcattcccaggatgttaagccctcacgtatggagggccgacttttcctataggtgagctccacagggctcactgtgggacttgagtacacatggattttaatatacttaggggtcctggaaccaattccctgcatgtaccgagggatgactgtacaccaaatacttctggaaatacgtataaaaaactgaaaatattagttgttttagggcttggaatcttggtggctggagaccagaactaaaagggaaactttacagtatacccgtttctgtacttttttaaccatgtgaataaactacctattaggaaagcccagaattttagaaagggaggaaaaattatatatctatatagaaaaacaactttaaaattatacatcctagtgttaacagtgcttattccgaatagttcagttgcaagtgatttatttatttatttactttttgagacaaggtcttgctctctcacccaggctgaagtgtagtggcatgatcacaactcactgcagcctcaaccctttaggcccaagtgatcctcctatctcagcttcctgaataaccgagactacaggtatgtgccaccacacccggctagttttaaaattttttgtagagatggggtcaccctatgttgctcaggctgtcttgaactcctgggctcaagcaatcctctagactcggcctcccaaagcactgagattacaagtgtgagctaccacgccttgccacaagtgattttttttatacacatctttttgaatattggcatcatttggacttcaggattaaacttcttcaaattattttaatgcctaacataagcatataccaacgtaagtatataccataataatttccaacataagtgtataccataattctatttaagcgatctcttgttgttgaacattcatgttgttccagtttttcattttaaacaatgttgcaatgggcattctttcataaaaagctttgtgaatgtccatttgtatttctttaggatagattcctcaaaaaagtgtatctgaatccaacaaatgccaaatcctaaggcttttggcacccatttctataccagccctacaatgcttactgaattattttcatgtatatcattttaagatgactgggtaatttataaggaggtttaattgactcacagttctgcatgctgaggaagcctcaggaaacttacaatcatggcgtagaatgaagaggaagcaaagcacatcttacatggcagcaggagagagagaagggggaagcaccagacacttatcaaacaaccagatctcgtgagaactctctcattatcatgagaacagcgtagaggaaactgcccccatgagccgatcacctctcacctggaccctcccttgacatgtgacgattacaattcaaattacaattccagatgagatatgggtggggacatagtcaaaccatatcaatttctaaatcactcttctaaaatatagtatagaaccaatttacacccttgatagctgaatctgagactgtcaacttctttatatcttcccaacactggatcttataattcttattcatcttggccaatttgatgggtaaaactctttctctgctgttgttttaattagcattaaaatgtttttggggagtaggccaaatttccccccacacatttattgaccattagtatttcttcttttcttttcttcttttcccccttcccttccactcccctcccctcccctcctttgatagggtctcacttggttgcccaggctagagtgaaatgaagtcatagctccctgtagccttgaactattgggctcaagtgacccagtagctaggattacaggcatgcaaacccacacctggctaatttttaaatttttttatagagacagggtctcactatgttttccaggctggtctcaaactcctggcctcaagggattctcctgcctcagcctcccaaagcgctgagcttacaaatgtgaaccactgcacccagctctatttatatttcttatgaataaaactaacagaagaaaaatgtgtgatttttttttttttttaatgggaccaaaaccttaaaagaaggttctgggagaatggagtagcacatatcttggctttcttctttttgccagtcaaggtgctcagaataagagctgttatagaaatgtcaagtgtaaaatgattatgtaagtctacaggccagctgctaggttatatctgactttgtacctctcaatatcagggctgtttaccacctcctgttccgtaagagtctggcctagtcattgaaattgatcgggcataatgtcaccacttctgatccttacgcagtggcatttactgaggcaggaaaggtcttaaaagttaattgcaattttctgaattattttaactcacaatagcttgttgcacccttaaacatgagatgggggaatcatttgtgttaggatggttttaccttaatctgcttttcaaatggcacactgtgtcagatgtctcttgacatagttgtgcagtccatctggcgtacagacggtcatcgttaatgtaacagtgatccgcatcatgtatatgtgtctaaacatcaaacaaatcaaactcttttgatgtccttttcaatcagtctttagtttcaaaaatattctttacactgctgagtgtaacagcaaaattgctttaagtcttttctctcctcccccactgtacactcagtgttttaaggaatttaaaacacttaactgcttcagaggatgcatgataggggatgattgcctttctctggtatcctcttggcatgtgtaacatacatgtagcggtctgtttgtttctcaatgcttcatggtctgtggtgcctgacaagacccagtctccatttgaaggcttttctgttgcttaccagggctgcagaggagctgctttttaagggcagtatttcaatagttaactgggactttggggaggcacagccttcggggagggcaccaccaggctcatttaattttcactagtaatgtggtaaggcaggcaggtacaatttacatttgacacacagggtaactgagttccaggcctatgcatggaggagacaggattttaaaattccaaatctcatgggttttctcaccacatcatgtgaggtgtcctatagaacaatccttaagtgaatgcgtttcgtgtccgttttcaaagatcatggtcagtgtataaaaatagacagttaaatgtccatggaacgtgtactgtccctctccttcccctgaatcatggccacaaagaaatccttcaaaagatcaaagaaaatggagatattgaacaggtcacactctgtgatcatgatgcaatgggtatagaaataataacaagaaggcaatttaaaaaattttacccacttgcaaattatgaaacacactcactgataaccctggaatcaaaaagaaaaccaaagaaaatattgacatcatcacttccattttcattggaagtgaaagttatcagagaagaaagaaaaaagaatattttattatcaaaacttctaagcacagtgaaagaggaaattttctattccttactaaagaataaagaaaaaataggacaagtcattactcagcttaagaaataaagagaaacaaaataaacctaaaaaaacaggaagaaggaattaataaagataaaagctgaaattaaagggatagaataatggataaataaatccgaaagctgtttctttggaaagaccagtaaaatatataaatctgttgaaagcccacttaagggaaaataagatagcaaaagagtacaaactaaagacaaagaaaataaatggcaaaccaataaatagaagataagttaaaatcattttgagacttgtataaacaaactcatggtaagaggtttgaaaaccagcagaaaaggatgatttttcagcaaaatataaatgatcaaaattgatcccagaagtagaaaccttgactataccaattactgtagaagatactggaaaggtaaagagttatcattcaaaaggattccagagccagacggttacagagataacctttaaagaaggaaaactgtctgtctgtctgtccattcatctgtctgtctgtctatctatctatctatctatctatctatctatcatctaatcaatcatctgttttctagctttattgagggatagttgtcaaataaaatttgtatgtatttaaggtgtgcaacatcatgatttggtatatgtatacaccgtgaaatgaccaccacaactgagctaattaacacatccatcactgcaaatgcagtgagaacacttaagatctactctcctagcaaatttcaagtatacaatacagtgttattaactatagtcaccatcctgcacgttatgtcctcagaatttatacatcttattactgattatgcccttttgaccaacatttccctatttcccacagcccctggcaaccccaattctactctctgcttctgtgagttcagtgactttaaattccacaagtgacagccgggcgcagtggctcacacctgtaatcccagcactttgggaggccaaggcgggtggatcccgaggtcaagagatcaagaccatcctggccaacatggtgaaaccctgtctctactaaaaagtacaaaaattagctgggcatggtggcatgcacctgtagtcccagctacttgggaggttgaggcaggagaatcgtttgaacctgggaggcagaggttgcagtgagccgagatcgcgccactgcactccagcctgggcaacagagcaagactctgtctcaaaaaaaaaaaaaaaaaaaaaaaaacaacagcaaaactccacaagtgagatcatacagaatttatctttgagtctggcctatttcacttggcataatgtcctccagagttcatccacgttctcacaaataacaggatttccttccttttatggctaatattccattgtgaatatatatgtcagattttctttatccgttcatccattgaaggacacataggttgttcccatattttggctattgctaataatactgcaatgaacatgttatttaaactcttccaactgaatttaaaaaaatacttgcttaaaatgtgtagtgtgctagccatagtgctagtcctaaaatagttggtacatacatgagtgtgaattcctgcatggtaactcatggaataatggaaaacgaagccacaggctttaaccgtaacccagagctgcatgtgtatgttgttcctaccaccgtggatcaggtggtgccaaggaatcatgatccacaggcacacatggaaaactagatggaagatggtactgaagctggtctttggaatatactcctgagagactaggtggcaactcacttttattagcccatgtaaacattatttataacctattgacatgcttggtttgggcatcattttcaggctagtgaggtttatgtctttatatgctatgtgcctaaatttatagacctggaggcaacgcagtgtagtggtaaggggtaggggttctggagtcagatggccaggatttgattcaaccatttatgttggttcaaccatttacgtgtgtgccattaagcacgttacattatgtctctgtagttcactttctcatctggaaaatggggataataatagtatctacctcatagggttgacatgaagctttagtatgtaaatatacataaattgcttagaacagtgtcttacacatagaatgccctcaataagtcagtaatgatgatgatcatgatgttgatatttataattatcattatcatcatcttcagcagtatttttataagttggagggaaagactatgtatggcttttaaatcagactggcatacctgttagctttgtcgtgggtgtattgtgtgcccttggaactttactgaactttattttattgtggtaaaatatacataacaaactttaccatttaatcattttaagtggacagttcaatggtgttaatacgtttgcattgctgtgcaagcatcaccaccatccttccctgtaacttttcatcatctcaaactgaaactctgttcctatcaaacaataactctatggaacttattttaaacatctttctctacatctgtgagggtaggcacacttagggctaggttgtgagaactaaatgtgggagaaattgcaaagccccacacaccttatagggccttagtacttcttgtccttaggaaaccctgtctatatcttcccaaacctgagtgcttaggaaagggtcctctgcagtcacactggtggctctcaacattccttatgttcacccttctcctctcttcccccctccatggtgacctttttctcagatatcttgttttgtgaacaggaacagcatatgcaatgtgttaactcgttttagttgccaagaatgtgctaggtgctatttgggagagataacttcccccattagatttactgtataaattaggtcaaacactaagttggaaagaagaagccagtatccatggaaaatttattattttgaatatacttttttttcaacattccttgacgatgaaatgtggtttccacttgtgcatgattacaacgttgagaatctagagttatatgaagacaagcttttctccacaccttttttgaattacatagaaaaaaattggaatagtaaaggcagccccatcttgggttaggcacctgataaacttgaaaacataaaaggagtggtggtgatatttccacccaatttctctctctctctcttttttttttttgctttgaattcgtaccctacatatctcttcttccttttcatacacattttaatatcagcagaatatttcaagaggacttttccccagctgaaatttccgaataccgaaattacttcaggtttgttttgggtttttttttattttgtggtgtttcctttctggctgactttttagccttctcagtagagaggttgtgatctgtaaatatgatagggataatggtttttagatctattgacatggctctttgcactcacactcatatgacctctatacgcctgtttcttttcctaatgtcatccacatgcctgacctggactatgaaatactttgttcctggggtcacccctaactagtaaatcattgtcttaacctgcagccctatagagacaagtgtggaatatatcctttgttgcaaagattgaagtatgcagagatgaatcagaccttgatgtttgactcctatttgtctcacatgtcttgggggttggttggcattgccagtgtagaaatggattgaaagttgggttttagatgatgagccacaaccagagtgtgatgactatttgactcctatttgaatatgatgtgaaaatacaaactgtgtttcagtagttcatctggctcagcatttcttaaactgtgctttatgagctgtgaaaaggtgtatgatggaaaaagggattctgaagtccaataagtttaggaaaagctgagttaaaattaagagtctcttagtaagaatttctcagaactgttagtctaaacattatgaactctcaagtggggagtattttatgtagcattttccaaactttatttgatccagaatctcctgggacatatctctaggactctgtgatgtgtttattgctgttttttttgtttgtttgtttgttttgcatttttatacctaacaaaattgaccattttaaccatttttaggtgtacagtttagtaagttatattcacaatgttatgcaattgtcatctctatccatttgtcttagtttgttcaggctgctataagaaaatactatagactaggtggcttataaacaacaggactttatttctcacagttctggaggctgggaagtccaagatcaaggcactggcagatttggcatctggtgaggacctgtttcctggttcatagatgaccatcttctttctttgtccttccatggtagaaagggcaaggatgctctctggggtctcttttaaaagggcactaatcccatttatgagggctcaccctcatgacttaatcacttcttaacactccacttccaaataccatcacattgatcggcacaaacattcagtctatagcactattttgagaactttttcatcatcacaaactaaaactttttacttattaaacaacaactacccattatcccctacccttacctcagaccctggtaacctttgttttaccttctgtctctatgaatttgactactctaagtacctcatgtataagtggaatcctgcaatatctgttcttttgtgtctgacttatttcacttagcatactatcttccggatttatttacattgtagcatatgtcagaaagtcatctctttataacgctaaatactattccattgtatgtatagaccacattttgtttatctgttcatctgctgatgaacatttgggttgtttccacattttggccattataaactttagtgtgcaagtgtctatttgagtttctgctttcagttattttgggcatatacctaaaagtgggattgctggatcatattgtaatcctgtgtttaactttttgaggaaacatcaaactgttttccatagcagttacaccattttacattctcaccagcaatgcacagtggttctagtttctctgtattctcatcaacacttgttattttctgtctttttaaaaacaggcattctaatgagtgtgaagcgatatctcattgtgtttgatttgcctgttattattgttgttgtttaacttccaactcatctcagactgatacgtgattctactaccattggttacacagttcagcacaatatatgactcatgtaggttggaaaacatccgaaatgttatactccctattcagtgaaatgagttcattgatcacacagttggatgtgattagaataccaaattgttataaaagtttttaaatgcttcacttcgcttctcttctgtcttcttttctcttctcttctcttctcatctcctctcttttcctttcccttcctttccctcccctcccctccgctccctctcctcccctcccctccactcccctcccctcctctccccttccctttttgaaacagggtctcactctgtcacctaggctggagtgcagtagcgtgatctcagctcactgcatcctcaacctcctgggctccatcaatcctcccaccttagtctcccaagtagctgggactataggcacatgtcaccatgcctggctaattttcatatttttttgtagagatgagatcacattgtgttgcctgcactggtctgaaacccctgggctcaagtgatccacctgctttggcctcccaaagtgctaggattataggcatgagccactgcgcctggcctaaatgcttattttcaattttgcagttatttcatcatggaccagtaccaaacccatagcaatccacagaccacagtttatcactgctctcagtcatattttacatgtcaaatatatggaaactgtttaatggaatatgatagatagtttaagcagttttattctaaaataagtgaaggtatttttcattcaattcccaaaatgcaactagtgaattatgttggaaaacaatctggccatataatatagtaatgcatatgttgggttttagggttagtttaagtagcctggggaatagttcagtaattttttggagggatagattccttggaatccagacagttttcctgataggctgcactgtggtattgcccctcaaatgagcttgaatgtcaagtccttgagaggcgatacagctgctgtatggatggtcatgagtctggaatccagaaagagataaaatcaaggtgcaagagccaacggagtctttggggttgagcactctatttccctaactgtgctatgaggaaaaaataattaatatatgctatgctggcaaggaattgtgcttccaaagctcttccaagcagagttaattaagtaatgtatgctcacttcattttgtagttggttctctttggcatcaagactgttaacttaagcaaatggaagcagcattgcagcttagtgcatagttccaaaagaataaagcaaaaccaaatttgaagagtttgtatgctaaaaatgatagtagtaattcacattctactctaaaactttgaaagaaaaatccacatctgatccacttttgtgagtgcagccagtattgatagttttgtctgccctagggagtctcattttccttcttttggaaactattcctcctctactcctccctggccaaggattcacggtctttctatcctctttcattagctactgtgggagggaacttgaccctagacaggtcaatatgggccttttcctgggatgtttttcaaactgcaagtaagaagagagtcagtcctctgacggggtgccagccttcaataatgaaacttgggaactagaggttcgtgtggaagaaactcatgaacagcaagagccaataagccaacatgcagggtgggcacacaagagattaaggaagtccagggccccagtacctgaggccttggtttacagctgtttcagtgggtcagctgcatccccaccctgtgccctgctgggttatactggactctgtaatccaatatatgcctatttacatctggatttctctcacttgcaaataagagtccctcatgaccccttcctgctcaaaacacttaacatactacctttcaaacagcaagtatgccattgatagctttgaataagctttaaaagttaaagttaacatagcctaagcactgactcgtcatcattctaacccagactcacactttgctcccattattgaaaaaacagtaacagattacttcaaaataccgtaacatatcaaactttatattcttttttttattttgttttattattattatactttaagttttagggtacatgtgcacaatgtgcaggttagttacatatgtatacatgtgccatgctggtgtgctgcgcccattaactcgtcaattagcattaggtatatctcctaatgctatccctcccccttccccccaccccacaacagtccctagagtgtgatgttccccttcctgtgtccatgtgttctcattgttcaattcccacctatgagtgagaatatgcggtgtttggttttttgttcttgcgatagtttactgagaatgactttatattctttttaaaaaataatttttagatacagaatatgggatgggtgaagtgaggggatttaaatcttgggggctaatgacatctgtgagtgagcagaaggtgaaggcatggcagagaggtggaaggaagtagaggaggcttgttcacacttcttccaagattggaagagggggctgaccaaggatgcctggaaggattaacaagtggatccaggagcctactgatgtgggagctcataaatttgtggcagctccaggcccaatcatggcagcattttgtccagtagcacagggagccaagcattagggacttagggtgataaataatattcccctcttcctcttctagctgagacataaacatgggaatcagacagagatcacaatatcatcttgacttctcatggaacaaattggagaacatgagtttagctcttcaaccaagtgggtttgccaatcctcaatcctgaattaaatgaatttatccacccatttctggcacagctgggcaaccacaggcctccgccacagagagaggccccttaccacatggcagagaccgagagcctgtcttcgtggaacggaaatagctgaggagagatgtcccatttcttctcccaaaccaacttagcaaagaaggagggagggccaggagtgttatcccagctgatgtccctccatatagacagacggctgatccttcttccagtggaggcaagagatggctgggttcgatgccaaggatcattgtcccaggctaactgttccatctgcattatttcctcctcctagtccttgttctcttatagaatgacaaagaggtggggatgctgaagctacatgcagtggcctagactggatcatgaaggaaataaggcaacaaggggagagagaaatggactgagagaaaagagcaaagtttgtaaatgaaagagcaggtgttataggtgagaaagaatgagaatcctggaagaagagggactaaggtaaaagaggaagagcatttacttcttatgtcccagttattgttgttctaggtgatatctaggttaaaagagagcgagagagctgtgcaaaggccctggcaggagctcacctggcatgtctgaggaccagtgagcaggtgcctggctgaagccgcatcgggggtggtgggtgggggagagccttggagatgtgatcagaaatgtagtgggtaacaggttctgcaggacttgtaaggacataggcttttagaagagaaacctgggacagagaagggttaggttattcagccaggaaggggcagagctgggatcctcagtgtggtggtgtggcatttgaccccagacacacagtgcttcctgaaacagtgctctggtctggcttccctgttgctggcttcccaggttctcctcctgcttatgtttgcttttcttcaggcacgatgaacttgtcctcctctaactgtcctttacatgtggatgatgtctctgggttagcctcgctcgttctgtgtctgacctctcccaggaaatatcctgctttcccttggcttctcctgtgttcctgggctggtgattcccaaacctacatattctgcaggggccttgcttctcaactccaaacccaaatataagtccctgatgagctagggctctctaaatatagagtgctcccagtttatttcccttcctcacagatctcctcttgcccctgttccttaggacaatctcaatgtctaaaaaccatggcattacctgaaatcccatctttcccctcgtcctctatccccacatccactcaatggccaatccaaagagaggtgctcatatcttccccctctggtttagctctccctgggatcttttaaaaatagttagttaattaattgttcttttttttgagacagggtctcgctcttgcccaggctggagtgtagtggcacaatcacggctcacttcaatttctgcctcccaggttcaagccatcctcccatctcagcctcccgagtagttgggtctaaggtgcgcaccaccaggcccatctaatttttttatttttgtagagataaggtttcgccacattgcccaggctggtctcgaacttctgggctcaggtgatctgcctgcctcctaaagtgctgaaattataggcatgaactaccacgccaggcctgggatcttatagtagcctcttaaatggaccctctcctccacccattggctctctccctctgcacctgacatcttttcccaaaacaaagctaggatcccaggactcctgttctcatgagctggtctggcttccccactgcctaaagaacagtctagatctttagcaagacactcagaggcctcctctgtctcacctttcatagttctcttctcctcccacctcccattttctcttctgtgatccgctgtgcttctgctcatttcccatccataaaatgttttcttctgcttcaagcagccacccagctgccaccttctgggtcaaacgtccccagaattcccccaggcagaatgagttgctcttttctctcagtggaagagctggtatcctcattaagtgctcctggcaaataaaaatgcattgaaagtctggcaagtgctgattgttgttggacatcagccagtcactggagtgtgactgttacccatacaggctgaggcagcaactgtgaacacacggcaggtacaggaaatccccaaattctattaattatgtggtaagttcctggagatattttggtaatgtattcctaaagttctgagtttcttaattgcatttctgttaaagggagtttacttcaaatgtagaaaacctaaccaaaaccatgtttaaaagaaaaacaagtcttataggtagaatagaaaagtaacattattgttggttatgggtttcctaacaagatctgggtcttctatgatagacttgcaaatctgaaagcctttctgaggtatgctagtccgtattaaaatttctttctttcttttctcattctcttttttctttttctttctttctttcttgcttgcttgcttgcttgccaaggtcttgctttgttacccaggctgaagtacagtggtgcgatcatagctcactgcagcctctacctcctgggctcaggtgattctcccaccccagcctcctgagtagctgggactacaggcatgctccaccatggccagctaattttttaaaaaacgttttatagagagagtcttgctctcttgcccaggctggtcttgaacttctggcctcaaggggtcctcctgcctcagcctctcaaagcactggcagtacaagtgtgacccactgcacctgggccttactaagatttttagggcaaatatttgttatagaaaatgtataaaaatgagaacttcaaaagtggtaattctagtttacattttaatattttccacctagtcttttcatttgtggaaactgagaattatatggatgctttatatgtatatattgcattttaaatatgtggcagtaaaggtgtctggattcatttgaaacccaaatgagcattcccttcattttctgtgaacgcaaatccatgatcatgttgatctctccctattggggtaaaagaaataacgccaagaaggttgggcacagaagggagcttctcattccctgtctggtttccacagagaactaccaaatgcagggtgtctgccccagagccagaaagctgcttgctctgtgcaggagataaaggaaagagagaaacctttttgcagatggaaatgacaactgaagaaagagaaaggtagcaaggagcttcttgcttgccttctgaagaaaagaggaagaagggcctggatgaagccccctcctcctgccccttctccctctgatagcactgccatgggctgaggaaacctcttctgtaactgctgggatccttgatccaactgtagtcagaggacaagtgcacctggcatctctgaatatgttttcccactgaagtgttctgtccagcttttagattccatcatgtaattcctactctccttcatgtgtactttggatgaaataagcttttctggcctgaacttagaaccaccatgcaaggatttatttctgtgggttaattacaaatgatggcttataagcagctaccctccaaatgaacttttggtatgtagcctgcccctaaatttgaggctgtttgtataaaactgtcaagctggtggttaataacaactaagtaacaatagcagcaactatcttttttttttctttgccatctcctatgtaactggcaagggctatacctacacagtgtgcctgtttttcataaatggataaactgttcttcatcatcgcatcttccatggtcctttcttgacctgagtgaacaagaatgtcttaataataactcccagacaatgagtgcccagaaggtgccagacgctgagctgtgttcttaatgtatattttctgtaattttgacatccccacaggtcgatagcatcccccaccttatgagttagaaatctgaggatcagaaaggttaggaactatgcccaaggacacgtagctaagaagcagacaaggctgggattctaactagaaaagctatttgtgccctgttccttgatatgtttgttattctcttacttctattttctaatttgatgtcagaactctgtttatgtgtatgttgaacaattccagttatttgatggattgtgaagactaaggaattctgttttattcattacagatacctagaagagtacgtagcacattgaattgagtttatttaaatatttagtgagcacttgtacatgtcaggaactttgctacactctggggtagagaccatcctgggctattccctcaccttgcctttggagtgtgaaaggaaagggagtgagttgcaaggatgtctttagagtaagaggccctgggaaggtagcaagctcaggtcttacccatagcccttgggaaatgtttttatacacagggcaagcccacaaatcaatgaaatgagaaaccactggcccatgaacaaggagggtttaatgtatggaagttacataaacagtggtataaattcatgtattaatatttgtctagtacaaaatagactctttgaggaactttatgttatgcctttctgttgaactgagactcatgttatgcagtacttgccaattagccagaaatggtaactttccatcagtagcacctgaggatttaccgccatgagtttgcagtggtcatctcagaggtgacaaccatttttccttgaattttgtggaatagatttttaccaatgaagtcacaatcctacctagttgaatatatcttttagaaagtcaagaaccttttctcacaaccttttttgggaaaaatctcaaacatacagaaaaattcaaagaatggtatggtgaataagcgaatacagggtcatccagctatggtctatgggccaaatccacccaatgcctgctttcataaataaagtttgttagaatacagacacacgtttgtttacatatgatctggttacaacaacagtgttgaattattttaacagagaccaccatatggcccacaaggcctaaaagatttactatctgaccctttatagaaaaagttgactgtcccttgatctagattcactgcttgttactattttactatttgctttatctctgtcttcacagacaggcagacatactcgcaacctctctctctctcccttcccccacacgtgtgaacatatatatacatgcatactttttttgaaccatttgaaagttatgttactgacattatgataattcacccctaaataattcatgtggatgcttaaaaataaaggcagtctctcatataaatgcaaaatcatgatcacacctaaaaaattaacattcattgagtaatatcatccaatgtgcagtttatatttaaattagactattacacccttatttagtttttcctttgggatctggggtctaatcaaagatcatacattgcatttgttcatgatggctttgattgccaatttttgttttacatgacattgacttttttgaagagtcctttaaaaacttcttgcaaagatgtatgggtttgttagctccacgatagtaagagctaaatatatagccattatagtaaagcagtgtcttgtacttcttttcccttgggattgagacacttttagtgtttggcttccaaagttaacacactaagttttgggttttgctggaaattgtaaatgtggaaaaatctcagtgtgaacagcaaggcagatgagaattcacagaatgcattttatgtaattaaaggcacagcccttctcgcttgctccagtggctgcccttgctagctcttggctgggtggctcttccttctggcttttcttctgcctagggcctggctcccctccagcatcattaggttgtagcaagaagctggaaacagacctgcagttatttaaatcttctagcccaaattgtttgggctggctggcagcacaaagcttttgtgtttgcaggctgcacgctgaacacagcatggtgttcaaaggcgtgcatcccagatctgtgtgtctgggatgcacataggaggagcaccttgttgagaatctgtgggggtcacagtcatgcacctcttaggggactacatgctggtcacaggtcttgtcttttattgtggtgccaaatgatgtccagagagcatcaacactcagcctttgctttcctctgggcagaaagcactcagagcttaaaggccagtcagaggatacttgcactcccaagtgaagactcacctggatctgtactagtcactcgttggtttggagttgcctcatggggtaaagggtttatttactgttcctgaatggtagaattgtaagtgagtggtgcacgtgtttttgaatgtggtatcctcaagattgttcaaggctagagcagtggagcatttgagaatcacagagccaagtaagttaagagggtgcatatgtatgtgtgtttgtttgccgttgggagggaaggaggaagaagaacatcatagagaaagagaagacaagaagaaagagaactaaaatggaaatttcaggaaggctgaattcagaataaggcacctggaaatttggagaggcgggaaaaggaattgccacttttcagacttagcatttttaacatctggggaaactttattttattttttccactgtgtgaagttaattgggagtcagatttagtagcggggtgactggtatggtatataacctctctgtgcctcaactactcctctagaaaatggagacaataacagtacctgctgtgtatggctgttttgaaaataaatgaaataatccatgtacatcctcagaacagacctggtagctagatggcaaatgcttgaagagtgtaaggtataaatgtttagttcatattattaagtgccccacataattcaccataatggtctgatatctacagccttcaccaatctttaacctattttcttaagaataatgagtaaattttttaaagccttttaaaaaagaattcatcaactggacatggtggctcatgcctgtaatcccagcacgttgcagggccaaggtgggcagatcacttgagctcgagaccagcctggccaacatagtgaaacttcatctctactaaaaatacagaaattagccaggcatggtggctcatgcctgtggtcccagctactcaggaggctgaggcagtagaatctcttgaacctaggaggtggaggctgaagtgagccgagattgcatactgcactccagcctgggtgacagagtgagactccatctcaaaaaaaaaaaaataaaaaagttcaccagcaagctttgattctcatattgacaaagtatttttccacttttcagcaatactttattgtactaatttttatctccatacgtgctcataaatattccagtaatagtaaagtatgtgacttttattccttctttttctaccatttttgtaaccgatcatttacatgtaaacgtaccaaatgaacatccacatgtacttcttccactggcaataagaaaagcaaaattccagggagaaaattttgctgtctctggaaaatgatgtgacccaaattggaagtctgagtactgagtaaagacaagtctggaagcaagtaagactggcatggtttgcatagctaaaatcagtgataaactgatatgtccgtgtgataacaaagttaactagaaaaaaggattgaaaacgatttatttcaagtaactgaaatattgggacaaaataagtgttttggaaagaaagatgttatatttaaattcagcgacaggatgatcaatgcacaactagaaaatctgggtcctttaaaatggactctgtatcaccacttttttcaatccttgctttctttccctttcttttctacctaggacagtgtcaatcaatgaaacatatatggccaagaaagtggaaaactgcaaaactcaggggatgggagggaactcttacatttgataatttaaaaatgtggaaagtaaccgaaggagaaactggtgagggtgtaggtgacttcagactttgagcagctagctcactgtcagcctccaagaggtcttgtgaacaatggcatctcttgcctgctgaaaaaagacctaggctttacccagaaagaaaacatcctgggatgaagccaccctcactgggggaaaataaagttgtagtaactcgtcattgttctccctgtctcccatcttcttcctttttagtacttccttcacaccgtctacctccccccaaccccacctgcaacaatctccttccaccatagatctgggttttcacttctcagatatagcccccctgtgacattctgcaacttgtcttccatggccttcgaggcgtctatgatcagcctctacctgcatagcctcatcttcctttggtgctggcctcagattttatgcttcagttcctcatataagacatgttgttttgcacctccatcgtttgggggctgtgtgatcttggacaatttgcttaattgttctgtgccttagatcactcatctgccaaaatttttcataaagttgtacaggaattaaatgagtgaatatatgtaaagttcttggaataatgcatggtgaataataagggctatagaaaggttagcaacttattgctattgttcttgttgttattttgagcctggatgtattaatttttttattactgcatacaacctaatgtctttaacaccaatggttatctctcattttctgaatgtcagcagtctggacatggtgtaactggatttttagctcagggtcctgcaggactgaaactaaagtgttagtgtgggctgaggtcctatctgaacatcttccaagctccttccaagctcatgtggttgttaacagaattcatctccttgcagctatagaattcatggccagcatgaattctgacctcaccttctaagagtttccctgattaggtcaggcccaatcagataatctttcttttgattaactccaagtcaacttgctagtgacatatcacagagttatagcccatcatattcacagatttcacttgcactcaagaagaggtgtgtacattgggggcaggattcttggggtttatcttagaatcctgactgcaaactgggtaactggaaatattctctgttcactaagttgaattgcacgtgggtgaatacgtgattctgtaatcaccaccatcgtttcagatttttgtagcatgtttctcacagcattcagatggattcacatcagtctggcttctggagccgacattccctatcctgtagttttcactaactgatggggtcagttagcaccttcaaaagtcttttaggaagagaacagttagagacttgtagctggtaaacttcttgactaataccctggagttccaaaaggatgacccacaatttgcaatccctttcagaagcatttgtttgtacttaatgacttaaaatagatgaagacagacccctccttaattgtcattggtgcctgccaattcaaagtaaatttgtatctgctagagaaaatttcactttcttgacagtcttttgcattagtattttaaaagctttccctgtccttttttctcatttcgattgtctagattttttttcttgcatttaactcagtgtataatccacaaagaggtattactagtcaaaatccctaaaggatgtaaaatacatctaaagaatatattttagaagatcaattaagaagaaaaacttgctaaagatgaaaaacctttttaaaaaaaaaagaaagaaaagaaaagaaatcaatttcaaccagattctaggcaacaagacatggacaaagaagcaataaggaatacctgtttttgagtacagttccccctaacaatgctaagttttcctttttaatggcattttacttgcagttttatacaaatgtgtcaagctaacgggaaaaaatgaatctggcatggttgtgggtttggaggtttgaagtgtctgtttatctggcatttcctaacaaagtatgatttgttatgcaagctatgatttagacctgaccatagctgccttagtgaccagtatccctacagcaacttgggaggggctggttcataaagataatctaagataatatagacttatatttctttttttccttctaggacaatattatcttattcttgagaggttgtaaagagctcggccttaaagaatctcaactttttgacccgagtgacctccaggatacatccaacagagtaacagtcaagtaagtaaagcgtgatttatgtttaagggaaactcctttatagtttgatttgcaattttgtgatgatgttgtaagttctaagagacagagaattggttatgcttaataaaataaaaatgtgaaggtaaaaatcaactttcaaaacaactcacattgactttccctctgtgcatagctttcattctgatcaaacatcattttttgaatgcaaaattcttgcatatagagtttgaattttgaagaggagaaaaatgttaagtaaagattaacagagaggcaagaaagaaataggcacagaatcagtgtgttagacaaaaaacttttattggcaccaattgaacatttgagtaggctcttggaaggtaaacagatctgaactctgttatgcaaagaaagcattagattatggagaacttgcttcttcatttacatgtgtaactgtcttctcatatgtgtcagtgatcaagttctttgaagatggatcaagaactttgactatatctacttaatgagccctgtttgggccaaataattcttggagcagaatgtcacaataaaagagacagcagtgtactttgtgtaaagaaatagcttgtgaccagggtatgagatggcagagataactttcctgtagtttagaagttctttagatcctactgatttcatataaaacattttccactttagccaaacaatgtttgacatggatatgccttaataataaacatagttacatagatagggtctgtgaataggtaacttttcttcttttgattgtttttggagtcattttatcatgaaggaacagaaaagggagagaagccaaaattcagagctgttaattttatacaatttgcttgattttatactatttgcttgatttttatattatatttgcttgatttttatacatttgattttatactatttgcttgattttttgtactatttgattttatactatttgcttgattttttattttttaaaaaggatgaggaaaaataggaaaaaaatgagaactactggataaaataaaatttggggtttatgttggattttgtgattcatgactgggaatatgggagagttagtagtgatctgttatctaaaagtacttttctgttgtcaatatgccattctttaaaacttctcttggaaaaattttaactaagcgaaaaaataacagaataaaaatcaggatatttgaatatggaaaccgcactaaacctcatcttggtcatcacatgccccatttattattgtacttaaatctatcctctataaaccattgttcactttaggaaattgttttaggttctgcctcatctcccattcatagtttcacccgggtggcaagtgaccagaaacaatagcaactgtgcagcttcgtaggtaataattagtcacacacacattgcttggagggtgaaggaaaggtcactttgaaagtgtctgcagctgcattcatttttttttagagccactttaaatcagtatgttactaaaccagaattctgagcctgattggttttaaaaattcaaatctcgtatcacctttattgcttatctacaaaaaactgggcatcaggaaaatgaggatctagccctaggtctgctgctcactagatctgaagccctggttaagctcccttcttcagcaggccccatgtattcatctaaaaattgaaactggatggaatattccatctggtatgattctgggtcaagcttgctcagtgcagatatgggaagatggaacaactgacttgtaaaaaaaaagagatttaaatcaaggtgtggaaagaaatctaaaggggaaaatgtcacgtaggcaagtgacacgtggatacagtcccttcttagttactgtaccatctttttgttttcctgttgatttttccgtctttttttctgtctccttttcttccttctgccttccctccctttttaatcccgtctttccatctatctctccttttgtatttcttctcctcattttctttttaatgtttccttcacttgggtactcttattttctttaggcaatactttgccatcacattcccccatgaccctggcatttttcattcattcattcaacaaatgtttgctgagcagcttctgtgtgttagatacttttcatcactagagaaatagaatgaactcagatagccaaggtcttctgctcatgtggagtttacaatccagtgtcaagaaatgagaagcaaagaagtaaacaaagaagatcattgcaggaagtgataagtgctgagaagaaaataaaatggagtgataagcaaaagacagtggccagtccggaggtggttgagggtggcttctctgaagtgctggcatttcagctgagcactaactgggggctgagacacaaataggaaggaagaacaggctgtgggaagatctgtggggcattcaggacagagaaagagcaggtacaaagtcaggggaagaggaaccacaagcttcatgtttaaaagaaagaaaagtaactggtgtggttgaaggataatgtgtaaggacatgtgtggtgggcgtggcagtccacaagcagggtaggatgttgaactcagaatcattatagagaaaaaacattttactgtatgagtatttcaaagaacataaagaattttatcttaaaatgatgctataaattcacttacagtacgtagaaagttgtttctggttttagtaaggagtagagtatggaataaactatcggatttcgtgtatttttgataagtgatgctggtttaatttggcactgtgcagggaatgcttgtaacatatgcagattttgtaaactaaggtagttaaagtggaactgctatatttctctgttgtccctctaagagctgagcaggacatctgtagacacagagaggagcaccccattgccaccaattactagcggaagcagtaaggtatagggatagatcccacagaagagctttggatggttttctggaagttttgtttcagaaaatactctttcatttagctttcatgataggcagtttttcttgtgtggtgtgtgtgtgtgtgtgtgtgtgttttcttttagaagaaacttgagtagaccaaaaaaaaaaaaaaaaaaaaaaaaaaagaggaaaagcctgcaagtgattactgcatgtgtaatttagtgaactctacctgtaatggatgccagacaaccttgatgggaaatgaaagtgtaatctagacaggcacacagcaagtattattccaaggaatcaaagcaactggacgaaatgtacgcaggctctggattgctcccgagtgtctctgtcaaaatttggaagtatttccacataataggtgggagtcattcaacaaatattttgtgagcttctactatgtaccaagcataatttttagcactgggttacagtcttagtgaacttttatcatcactgcagaaaaagctttatgttccctattcttaatttgttttccataaaagtttcaaatcttttatagatttttaaaaatctggtttctttcttaaattaaaaaccctagcagattgggaggccaaggcgggcagatcacgaggtcaggagatggagaccaacatggtgaaaccccatttctactaaaaatacaaaaattagctggtcatggtggcacgtgcctgtagtcccagctattcgggaggctgaggcaggagaatcgcttgaacctaggaggtgtaggttgcagtgaaacaagatcacaccactacactccagccgggcgacagagtgaggctcagtctcaaaacaacaacaacaacaacaaaccctagcagatatccaagcagataaggacatcccattttttttcctattaaaaacagaaacatgaaacattttttaaatcaaatccaaactggactaatgcttctttcaatctatgtccttgttgatgggtttatttccatggtatgctacttgttttctatttcttcaaatttcaatggacttaaaatggttcacttattcattaatatgtactttaggtcagtgtatgctgcaatgaagtaatcagggtctaaatacttgcaggaattcttgactggtttatatgatagtcttacactcccttccccctcaccgaagttactgtggaaaaaagaagtgcagtttgttttttctagtgtgtatttgttgacgtgttaaaaaaactttgaaataattttgcaggaagtcttatttcattgtatgaatatttcgaagtagcttttttgtttatagttagagagtaaacatgggtgcatatttgagcatgcatgtgtgtatatttgaacataacaggcatattttcctgcttatggcttattcccagtgctaatttatgtccagagcagaaaagaacaaatatttggataggattccttcttgtacacatattttcaggtctgtctaattaaataaggttttagacctgtgttaaaaatacttgcatgaagattttggaagtgcagtcggatttcagtttgacggtggtctataatcaaggcagaatcttcagtggttaatctttgagaacacaactatgaatagtcccagttctgatcggactttttctatttccagaaattataaagcatcgtctttttatagcgtactgtggaactttaatcccaccttgtccttctacattttgtttcctaattaactttattcagtgcccgaaatcacaaaacttaagccttaaaaaataatacattcttctgatttcattatatatgttagcttcaagtacatcttagtggcatttaaggaaaggtcacaatttagaatctgctattctgacaatattttcttttccctttccttgactaggagccttgattatagtaggaagctgaaaaatgtaagtgttttaacttccaaacttgtatctttgatggttcaagtgtaaaatttagctaattcagtgtttctcatatgccttgctggaaaaagtccttagaaaaaagtatatgtgtatttcatagaatagttaatgaccatgatagaaataaaaatagtaaattgtgtatgtgttgggctggggtggtggtggttctctttatttagataagtgctcaatccagaaataaacaagtgaaagcttgtactctgtttatgattcagtttcttaaacacaaaatgatcaggctcaatactaacattagcccctttccatttgtaggcacagatgggattattaaattaaggagtttggcaaattgttgtagggtaagatctgcacaatatgaatagtgttgactgccatgggcctatactctatgtattttgttctcctttaaatcttttgcacttttattagtacttgcccaaatgaactttttgtagatcttattttcaaaaggcaagtatgttagtgctgttttattttcagtttagattgaggaatgaaagaagtcacattctgcatctaaaattttaaaattggctgaagcctctttttaaaaaagtttccctaggtgctattatatttgattggcattttcattcttatcttctttttcctcctttataaaactagaggtatacgccatttttcatcataaaattttaaacaaatcagaaaacctttaacctaaaacacaacagtctattttccattcccccgttataccttttaagatagcctcatactctcagcacacattagttattttatggtcctagttaatgtcctgacgtttgaatctctggaaatttatttgtaagcaatcagttcaaaaggatgttctggaagtttcgagggattcatgaagtaaaattttcccacagaggtagaaaacagaatcacctcttagcatcagtgcacataaccatattttgggtctgtcgccagctggactcatgtaactataccatgttgtccgaaacattttctggcctaccaagtagaaggaggcacaataagtacttcccagactggctgaagcgataagacagagtgtgaaaagaaaatactcatcttagcttctacatgggcctcagatacttgtaattcagtgtgaaggagctcatcttcagctgactctgctgggtttcatgggaagtgaatgtaaagaggatttgcttttgtggacaatttctttggaaatacagaacaaaattaacttgggaccgtagcttcagaccattgaatactcatagacattcttaaatatccaaggttgtttaattggtagcaagccttgtcaaggctcaaaatttcccatctcagattaatgggaatctaactataccccaaagctaggtatctgcagatcatattcttcacgacactgctttcttttgactttaattagatatattatgttgatcctgtgctgggaaccactaattaacctttatcacttgtttgggattttattttttttctgccattggccttagcggaacctctgtgcccacaagtagaaattatgggccttcaaaagcacctttctcaaaaggaattgacagtctctttcattgcttctctggataaagattccaaagcatttttgaaaaattgtgaaaccttcactacataaaagataatgtgggtagattcatttttccttcttgctgtcttagagatcatttcctcactacctaactttccctaacgctggagtcgttttaactactcaaccgtgtttgtgttgcctgacatggcattgggttcttattaaagtgattttacatttaatggatacctcatgggtggtggttttttaaaatcgatgtaaatcagctctttccttcctgccttcctgttagtggtacattattgactccttagtttaaacgtcattcttgagggaaaaatctgctcttgtgcgttttgttccacaggtattagttaccatttactggctgggaaaagcagcaaacagctgcacatcctacagcggaacgacactaaacctgaaggagtttgaaggattgttggctcagatgcgaaaggtaacttggcttttcttctttatcccataagcgttagacaaggtgggaaagctacacatttgcttgtttttaagattactagagtactgggttgtggaatggtatgagccaaagatatgcactcaaggaaacgatcacttgtcttaccaatgacatctttgcctcatgcatgtcacacctacctgcactttcatacccttcagagaacaggagttctgagctccatccaactttttaattccaaaaaagcaaattcaatctatcagtatatgcctttgtatgccaagatgctcagtgcttgttttcttgggggaataatgcttgaattaaacaatgcagtattatgcaaaaatgaagactcgctctgcacttttgtgctaaagggcattttgcttacccactggggccttgatgtgggtgaggtaacgtgaaccaagctcttaccttggcatacgctctggacaaggcgggatacattaaatgcattctcctctaacatgtgcatgttatagccactgtttttgaatgacataggaatttggaaaacatttcatacattgttaaaagcttcatttgtttctttgagtatagaaaagactgacctaaggtagggatttgtcaaggaaacagttgaatgtttcatgtgtactacttgcctgaatgtttcatctgaaggtccagcaatatacaactcatacaaatggctagtacatagtgttacccaggagaggccctcccaacccgccttagtgtacaggtaaggcttatttataatggacctccatgtacttttttaattattttatttttttgagatggattcttgctgtgtcgcccaggctggagtgcagtggcgcaatctcagctgactgcaacgtccgcctcccagattcaagtgattctcctgcctcagtctcccgagtagctgggattataggcagccaccactaagcctggctaatttttgtatttttagtggagacagggtttcaccgtgttggccaggctggtcttgaactcctgacctcaggtgatccacccaccttggcctcccaaagtgctgagattgcaagtgtgagccaccgcacccggcccctccaggcattttggataaagtccacattagaggacaaataattgaggccttactcttcctcatttctctagtatgcaaaataaatgaactagaaacattcagttccttgcaatttttcttttaatactgaaagcaagaattggttccaattttctaaacatttattttcctttccttaaattaaagctaatggtcctgatagttcttcacatttggctaaggccagtctggctcatgtatttataaatggccaaagctttcatattggtcataacgcacatacacaaggtactttaagctgaattcctttaaaaattaaataaacacagacacacaatgaagcacaactcattgcttctcagtctcacctcttatttgccctttaatttctcatctaacatccagtctggatttgagatgtctaaatgtttattgtttttatattaaatttggacttgaataataatagatgggtcatgaagctttgtctcacagttcccctgctagattctgttggaatctgatttattctcatgattgacatttcttactactagtccagctcctgtagaatctgagcagctattggtttcttcaactctcctagcttctctttctacagttagtttcttcaactgctgtaaaatgacctgttgttaacagctgttaccctttttgttgaatgtaggtaacatcacaggacatggtggagtaagtagtatccctggatacatgactcttagcaaaaatggccagccatgatactgccatatctccatctagagagaaaatgacttgaacttcactggactatctgagcacctggaaatactagttttatatgtgatatatataatctcattttgtcagttaggatcgggttcagctgggaaacacaaaagcctcaaaataacagataaaataagacaacaattttatttctaattcacataaatgagacgtggacatgagcagtccagggctgatgtggggttccatgtcttttcaccaacagaaggcccaagcttctttgtctttttgtaccaacaacctcaacccatggctgttcacctgctgatccaagatggctgttcaggctttagccatcatgtccacattcagccaagaaaagggaggaatggcggggagaagattccatgctctccctttaaacacacctctgggaaattacacactacacacatagctacatcttacagacttgaacttggtcatgcatccatatctagctgcaagcaaagacttggggaaagtagactttatttcagctaaaaactgtaggcatttttgttaggagagcagatattgagggacaactgtaatctcttctgcacatatgcaggctgaaataaatttgaaattagttttttttctttcacaaaggagattatccacaaatttttatattcatttttctagtgggtgaaatgtgcataaaaatgattcactagggtgcaacttgttaagttctatagtaaaggtgacccaggtagagcccttggcataaagtctggcatgtagtaggtattcatagattgctgctactgctgtatttttttttaaaggatctctaacatcacagtgacagtggcctttcactgagactggatatgtcagaaaagtccttccaaaggaagtggcacttcagctgaacaaagaggatttactacaagaatattaagattgaagggacacccatggggacgagggtggccctggagatttcaggatctttctctcatctcttatctctccttaaactcattatttcttcctataggcaaacattcccttataacagggagcgtggccagtatcatccccaggattacttgcttctagctccttgcccagaaaagcaagggaatgctgtcccctggccccaggtgtaaaaaattcctagtaatgtaccctggccccatgtggaccttattcctgaagcagtcactgtgatcaggggcaagtgataccgtgactggcccaggctactcctgtttcagggggtgaggggtattacaggaagaaagggaaaaggggagggagcatggtgggcaagcagatgcaagatctctgcctaaaagagcaaccatctcaatttctagtccctcaacccaccttatgttttttttttttttcatgatacttatcatccaattttgtattcatttgtgtttttctgtgtattttttgtcttctttactggaatttaagacccatgaagacagggtatttgttgatttttctggaatgttgtgaactagaacagtgcctgtcacacagaagatgctcagtagatatttgtggaatgaacagcttccacaaccagagggtggtgggtggagagtggctgagcaggctggaaaagtagaaccctaaagccctctagatcagggtgagccaccttacaaatcacaaagggagcagaaaatgttgagcagtaaaagagaagcatctggagtttctcagaaactgttaagtcatccaccagtcctagctggttcttgttatgtctgagaaagggggataggaggaagatgagtaaaataatcccaaaatttcatgaagctagtagttctcaccccttcattaacatactttaactagagtaactcagtagcagttagcacaagggactgagattctagatgaaaagcagagacaatgttaattagagcccaagaaaggagaatgtagatgtgctagtctctgttggtttatatcttctgctcgccatcagaagcttcactttaagtgaccagaaaatgagatatggtgacttgatgggaaccaatagaattgtccatccagctgatatcctcatttttatttctggctgaagagccagcctgtcacttcaccctgagcttcctcgggacgagcttggccaagcacagccctgggtggcctggttttcactgttcaaactggccatgccattcagctcccagctcttgcacttggtccaaggtttgattcttggctttctacacagccgtgaatataacggcctctctgtttttccttcccataactatctgtgagaaagcaactaacgctccaagaggcatgttgactttctcctttcttctcctgtggtttgtagggtgagggtggggaagacatttgggcctgtggggagcctttctgatattattttcttgaaagtccagttgtgtaatggctgcaccaaggaacttgtagctgtgtcatttccagatgtgaccagcggtccgcctccctgagtgtctgccttccctgatggtaaattaggctcaagacatctagacatgggatataaatgaagagagagatagaggagtgtcaggatgtgtagaaagttgtgtccttagctacatttataaatgttttatgatttgtatatattgaaatttacccatttgagagaataaattgtagtaattataactatagctgacacttttagagtacttgttctgtaacaggcatttttctgaatactttccatatatgaacacatttaaccctcccagcaactctgtgagacaggcgttattattagtcccattttacagatgagaaaactgaggtctggagaaatgaaataacttgcctgaggtcacagctggcaaggggtggagccaatagttaaacccagccagtcggtattcggagaccattctcttaaccattaccctaaactccttctctcttgcactaatcatgcttcatataacatttcagtcaacagtagacagcatatacacaatggtcctagaaaattaaaattcaagttgaatatccctaatctgaaaatctgaaatccgaaatgctccaaaatccaaaacttttgagcaaagacgtaactctgaaaggaagtgctcactggaacattttggattttggattttcagttttgggatgatgctgaactggtaagtgtaatgcagatatttccaaatccaaaaaagtcaaatcctgaaagcttttggtcccaagcatttggataatggagactcaatctgtagcacattttactgtatgttttctatgtttaggtatgtgtagatgcacaaataccattgtgttgcagttacctacagtattcagtacagtcacatgctgtacagctttgcagcataggaacaatgagctgtacatatagtctaggtgtgtagtaggattggccatctaggtttgtgtgagtacacactgtgatgtttacacaacaatgaaatcacctaatgacatatccctgtcattcagcaacacataactatatttatagttttgtgatctagtcataatagcatttagctgaggatcataatccaggttagcatcatctacagaataaggaggcagtaagtgtctagtagtagagaagatgctgatggtggaactgtaactgtaccaaagatgatcaaatattttcagctataccgtttgggatttggagacagagtcctgtgttagaatcacagctttgccactaactgtgtgacctcagtcaagttacttaacctctctgattcttatttttctcttctgtaaaatagggataatgctaaccatgttttaggatgagtggttgtgaggattaaataacataacatgcaaaaaacatcaagtgtagctgcagacacataataagtgttcaataaaagtgacctttgttttttagccatttggcctattctcagtaggtaaataatccaagataattacttgcatttccaaagaaattaaatatgaaaccatatccaatttgggtctataattttcagtgagtcatgagttcttcctttttcagttagtcaggcctggcttttgttcaagtcctggttaacttttgacctaagagtaagctaccttaatttccataactggaatttctgccttcctctggagggttatgccggctctactcacccaggccatttgacaacctgttcttcagggcattaatcagtcctctgtctggaggctgcagggtgctcctctccgtcctgcccttgtcctcttgcccactcccttctcttgatgcaaagctgtgtgtgtcttgtaaattacagccactctgtcccccgcaaagggcctcctgctgcggagtatgtcagaggctcaggatataattgatagaagcagccagcaaaggcacttcctgcaaaggcattggctcccgtgggcatcctagacagtttagaccagtttccaaaactgctaacatgaagaatatttatttttcctttctattgggaatgcagaggggactttcgcgagcatcccagggaatctgcagtgtggcattccagtctttgcggatgagaacatgcctctctgccagtgttatccacagtcctaattttaagcgacagtctggatgatattaaattgaggtttatctttgagtgaccagagttatttttgttttagtcagcctggactattgtaattaatgctaagacactggcgggaacaaggcttttattataatacgagggtgaggatggctttgactgacctttcttctgctggagtttcagtgttttagtatgtgctgcttgtgctggaaagaatttataatcacaggctgtcaaagacagccattgttctccctgctctgaacatgtgggtcagccacaagtgctttcagctcccccagcgccaagagctggctgagagcgagagcatgcctggattcttctgaggcatcaggaaaagcgttttgcatatttttcattgcctttctttttttttttttttttttaacttttgcctcagaaagacagctccctttcagagcaggaatttcccttcaaggtagcaggagatgaacgcgtgctgctccaggattttacagaactgattctgcagcaaagacaaatgttgcctgtatttgccagatagtataaacaggagcaaaagttgcacagctaaaccaggggctcattcccaggacagacatgcagttatggattccgaaagacaagtcaaggttaaggttttggtttttcgtttttgttttgaactatcattgtactgttgtgaatccaaactttgtgatcctttcttctaattctttctctactcttttttttttaaacctagggaatatgagttatttggggatttttttaaaaaaaacgttgtgcatgattttctgattgggaaagttgcagcaaaggaggctccaggaacagagcagtgacttttcaaagatgattgatcctgtaactggtttccacaacctttccattctgatgtgatatgcaggggtttttttggagaccactggagacccatcttcctgatagtgtaggctagaattatgtctgtaaccctttcattttcttttttgacaggacactgatgacattgaaagtcctaaacgcagtatccgagacagtggctacatcgactgctgggattccgagcgcagcgactccctctctcctcctcgccacggcagagatgattccttcgacagcctggattcctttggctctcgctctcggcagacgccttcaccagatgtagtcctcaggggaagcagcgatggtaggttggagtcttaataaactatccatcttgaaattaaacatttgcaggggctgcattgcgcctggcagagggatgggcactgggaaagcaggctccatatccaccttgccggaacttagtaattctataaactggcagaaaaaagaagtctttgaatgttgtttttcatggtccttagaattttggttggctttgccaggagtttatttgagcactgcctcagtgagcatatcttctgttggaaaatgtgttacatcattcctcccttggactcagtgaatcaagacactgtgcagaccattagctcataaagtgtgctggaggtttatatactctgggcatgaggaagctaaatgtttgagtgagtaccacactatataagagaaaatggatcaacttccagtaaactggaaatgaactgcacacacttagaaagttctgaagcctgggattgtgcaactttaattggcatgttttttggcaatctgtttgatgcttgtgatacctgactggtatagctagcacgatgcaggtggctgttaatgtatagtgcacaacccaggctgcctgcttgttctgaagctgggattgatttaaaccctatgggttttatatcacttggaagaaatgatcatttttcgttacaaaaatgtgtaatcatgtaacttgatatacacgtaatgcctatttttcagaagccatttgtcttacttatcttgtacctttgtacttttagaaggaaagatggtttggttctacatattctacatatataaacttgcggaaaaacatgagggctagtggggaatttttaaattgtttcttttttcaatgtattgcttggttgatgctgctatatctagctaatatatcttaagcctactctgagatccgaattatcttttgtagctaaaagatcccttccagctataaaattctgttacgaaaatacttgactatttaatgtgtccaggatctaagttaattccttggtacacagtatctcatttagtcctcagctgagattttagagatactcactcagtatctcattcaacactcccacagagctgtgagacactgcttatccttacttcaccaatgagcctttgagaagttaagtaatcatctcaacatttacaagttacaaaaaaatcactgtcagaaagtagcataacaatgttagctttaagaagtgtgaatgcagaatctatgctcttaagcttaatttacccacatttctttctctttgcctaatagatgttttattctggaatggctgcaactaatgcttttgtttaggacttaaactttccagcaaatagtttaaccttggggccacatagtatgtgactcctaaagaattccagggtgcattgtgagcctcttgcaaagcatttctaaaatgttatatgtcattttaagtgccccccacactattagaagttaaataccaagttcactatctaactgagctttaacataaccaaagagtagatttacttttccaaaacatgtcttaaccaaacgatttcatacatattattttgattagttgttttaagttattgcattttcttcatcctgtgtttttcttaactggtaatgtagattatcattatttatcattaccagctttggggggttcagagtttaaacgaatcacatcttgaagggattggaggtggtgattactaatattatactaatatgtatgaagtacaatttagtttgcagcaattaaaattgataagctagagtgtttttatgaatgttttctccatccaaaaaaacatgaaattagagcttcacaaacaccatccatgaaagagcttcttatacacagattttaccaatcaacccgataccttaaggcttatgctcttgtaaactaatcaagacctaatgagattcttaaagaaaaacaacacatttattaatctgccatttaaaatgtagtataattttagccaaatagatgttgggtttcataagcgtttatagtatgtttttaaatggtgctgattaggaagattgctagtcctaataaacacttccaaatttgaaaaaacttgttgtaagtcttgagaatttatttcctaggactcacaatcaattggggaatatcttaccatgaaattattcaactctatgttgggccaatatagacatctttcattttattattatccactcccactaatccattcaataaagataatcaagggccatactcatgagaagcatcatgattctgtgggttggacacagagctacctggtaggatgctgtagatcccagggttgattcaaccaatctgtcttgctagacaggtgtccaatttctcccccagcattaatagcatctcttatgagtccacttaatgggcttcattgaagaggaaataacaaaaccctctacccagatgttttcaaaattaagaacatattttgtaaatatgcattaggttaaatgaacagtctaatgttttatatcaaagatgtgctgagggagggaaacaagtaatgagagaaatcaaagtgctagaggaagattaaaaagcgaagggttgggggtgtgtacggcaaagatacattaaaaaaaagtaatcccagcacttcaggaggccaaggtgagtagatcacctgaggtcaggagttcaagaccagcctggccaacctggtgaaaccccatctctactaaaaatacaaaaaattagctgggcatggtggcgggcgcctgtaattccagctactcaggaggctgaggcaggagaatcacttgaacctgggaggtggaagttgcagtgagctgagatcacaccattgcactccagactggacaacaagagcgaaactccatctcaaaaaataataataataataataaaataaagaaaatcatcatcacatgctagattacattctcctaactctggacataaatggagaagccaccttagtagatttccatgttcacagggagaagtgaagtcaaaacttttgaggtgtcagcctcaaaagaagactctgacatttcccaagggtatactgggccggccacctcctaggtgctttatgtcatctcatttaattcttgcgacaacatgtgatacctgtattatcacctccatgtatcccatgaggaccctgaagtatagaagatttaagtatcccagggtcacacagctagtagatggtagagctgaaattttagaccctggtctctaaatccataaacctatacttctttcaactgagctactctgtcctggagcatttgcatggctaatatttcttgaagtgtctaagacattcaccaaagaataattgggggaaaaagtgatttgcttatgttgttagacaacatatttggagactttcactcagtatattatagataatataaatatatatctatatctatatatgtgtgtgtatagatactatacacaaataggattcatagattataggattttagaattgagggacctgagacaactctaatccatcactaagctttcatagttgattgaagaatcatttgctttatttgttcaacaaagtgcagcacttctcgtagtcagaacacttttatcaggagacattttcccaagacaggtgtgtcacagaggaaagaactttgggagtcaagagaacagaaagtagagtttcagaactgtcactaaccagccctgcagcaggggttcctacagtgtctctgagcctctgtacccacctttataaaatgggatagtatcaaatggggaaacaaatttaagagtttagcaaggtagggtaatgtttgtttataaagcaattcacagggggctctaaacatttcattatgatactgagacagatatacttgtttaaggaccgggtggaaaggagctaaattgtgagtcaaatactgtactaataagtaatgaaatggtcaaaacttcagaaggaggactgaaagcatgtggcatgaataattcataaactgaatatttcatctgcaacaatgaacaacttgtttatggtcaatgcctttaacgtttacagtcttttaaaagccattatatcatttaacctccagggcaaatcattttattcctattttacagaaaaggacagtcaagtgtgttagagacaaccctaggagccccagctcatttctgacagatccagaactattatgacataaagagtagccagcatttattaagcacttaggctgccccaagcactgtaccaatagtttcatatgtatctggttcttccaacagctatgaagtagggatattattatcctcattttgtaaattgggaaactgaggcttaaagtactgatgtaacatatgtaaagtctcatggctaatgagcagcagaactcaaaaggaagtggctctgacttaacaccaaccttctctgccaggatgccacatctcctggctcttagtttaaggctcttttcttaagggtaaataggtatatattttatttgttaccaccatagttgaataatcttgtaatgctctcattgattgttttcaaccagcattgaagtggccgctacttatatggcagtgtttgttggaatgatggcttcatactaatagatcctagaaatctaataagatgagactcaggaaacaagaatactatataattattggggcttttgtccaacaaatggctgatgttgggaatgctgaattcctttgtgttgtttaaaacactctaagccaaaccaactcttttattcatcagataatctaaggatgcccactgtgtacaaaggcaatgacataataactataaaaactataaagcccttattctcaaagtacaaggtagaaagtataatgtgccagaagaaaagacaagatcatgggggcatagggttcacaggaagaacagattgcctccagccgtgggaaccaggaagagctcccatgcagaggaactacttgaaccacttcctggaagacaaacccttggtataatccgaattgatcacttttctgagtttctgttgttctacatctgtgcttcttgattataacttaaattctctaggtatgttatgggttggttaaagatgcctcaaagacaaaatgcttcataatttttatttgctggagtatctagcatagtgtaagacatgcagcaggggctcagtgaaaacttcattggataatttctgttttcttctgagagtagcagaatctcaggaggcataaaatcctattgcagatgtgttgctaattgtaattctcggatacagttaggcttatgtctgtagtttttagttttgcccttgtcaggtttttttcctgatttttttccttcttttcccagagtggagtaatctacatgtgtaacaaatctacactttagatttgttaagtgaatgatttaagaaggaatcctcagaacccacagattgaaccacatccctaatgcatgcttaacattgggaactttctgctagcctaacacactttctcagtacccatcctctcttccctagggagaggaagcgactctgaatccgacttgcctcatcggaagctgccagatgtgaagaaggatgacatgtctgcacggcggacttcccatggtgagccgaaatcagcagtgccttttaaccagtacctcccgaacaaaagcaatcagacggcctacgtccccgcgcctctgagaaagaagaaagcagagagagaggaataccgcaagagctggagtaccgccacctccccgctgggtggggagaggcccttcaggtaaggcctgagcaccgctgccctcttcctggcttgggcatgagtggtttgggaactgcagctcctggacaggaacgaggttaaatgaccaattcagaactttgatggaagattacagatggaggtgggtgggacagatctttggagagagcttgtcaggagaaaatagaagcttcgtgagtgcgcctagaacagtgcctggcacacagtaggtattcagcaactacttgtctaaataagcagatttctgaaaccaattctgttgataggacattgagagcaaatctgtcatccttgtccttctgcggagactgcttgactcccaatcctgtcagattaggcgtagaaagattcctatctttatgcaaaaagatgttttaaaactctaggcttaaattaacttgatataagctcaaatatgtgatgcatggaatgtggttcacaataacatatagaaatagtcataataaatggatttctcatctctttagagaaacagtgttttaatctctgattatgcttttgtatttatttattcatttattcagcaagtacttattgagcatctactatatgctaggcattggggacccaataacaaataaggcagagtccctgccttcaagaatcttacaataaaataaacttgtctaatagtccatctgtactattattttccattgaataaagatgttattacaatttttaatttgctgaacaaactaatgaaatttacctttccagcagaaaaggtttttgcctttcattatcaagtctgggataactctcaatgttgcgggtatgatgcattgtatgaattaaatggctgcgttgaattttcttcacattatcaggattatattgtgtgctatgactttcttttctaaagtgaaaagtaatatcagaatagcggggagatgacatggggtctgctccccagcccagtctgttagtttggtaaaccatattgtccaactcactagctttcctgaaacgatagaggaagaggggagtgaagtggggtctgctggtgaagacaacccagctggccaaatgaatcctggttggaagccttccgatggtgggtgtgaattacctgacggcagtggtaaggagcacccttcttcagacggggctgtggtggcaccagctcccaagtctgaagaaaaagatgctgctgagatccaaaagcgcaaaaggctagagcaagctggaatcaaggtcatgccagcagcacagcgctttgccaggtcagctctgggctgagggctggcccggctggctttctgcatgcctggggatttggaatctgtctagagagttggagttttcatctgatttttccacttcccgcttttcctattgcatcactgttccctgctctgagcacgtagatgatagtctttgccttaaggcatgtctctgctaagtacctcctgggtattttaaatgaaggtgaagagtgagctcctcactgctgggtgcagcccttgtctttgtcatgtatttgtgatcagtcatgtgtgggctgcaggatttacctagcaataacattgtatttttctattgtttgtggcttgttaattttcatgctactcctaaatggctcatatcttactttacacatcactagaaaaatagtctgttgctttgaaatggggaacactctctttagagagtggctggcttacaaaatccacttactttctttgtcccaagagagtactaagtagaattgggtttatttgactccttagtttctaaagcatgttgattcaaaaacaaagaatggagtaattacttctctttaattgtaacaaaggtactagtatccagtcctgatagcttcatattacatgtgagatggagaccttcagcaatcagagccaaggaaaactatagttctgcactcttctgtagtgttttgagaagctggttaatttttcttataaaataaccacaatgatcctaacaaataatagtgcagccaaaatgtattttacaaattgacattcataataatttgacagttggaattcctttgccacttgctgttccatttaatttttttttttttttgagatagagtctcactccgtcacccaagctggggtgcagtggtgcaatcttggctcactgcaacctctgcttcccaggttcaagcaattctcctgcctcagcctcccaagtagctcggattacaagcgtgtaccaccacgcctggctaatttttggatttttagtagagatggggttttaccaggttggccaggctagtctaagaggtggctgatatacccatcttccagaagtccagaagtgggagctgaggatcgttgatagtcagtgacttgcagagctggtcaccaccgacctggtgatcagattcggatgctctgaccacagcaccacatctgcctcccacacattttccatttctctatacagctccacatgtggttatttatgtggtccaggtcttaattaaatatccagtgttgagttacataaatttaattctagagtacctttgtattaaaaaaaaaaacaactaaggatatacttcctccttgtctgtggtatattacagataatcatgcctattctgaacacgtatgtgcttctggaatattctaacataaaattgtgtttatgttacaaacagctctctgagtttattaaataaagagtaatgtaataaaatctttttttaaaactccagattttttaaagttttgatacagagaccttatcaaacacatttttttctgcatcccttgagcatcccatacaccatgtaccagagactggactagatgctgagaagacaaaaataataatagtgaggggaatactatctcctcactaggtaccatttttcagacttctccagcttctgcctttaaggacatagtagtaggtaataagtgatacagataagaatatgaacttacctgaaattttaatcttcctgtctttgacacacatctttcatttatatcacgtgtaaagtctttaagctagtgtttaccaaggataccatcatccttagagtatctaaaacagcaaagggggatgaaggggagcggcattaagctaattcagcacactcaggaataatggtcacatagagaagagaagtggggtaaaggctgggaagtccatacacgtactgtgccacttcagtacctgggacgtttattttattaaaaactttgaactcttttatgacaactcccattcactgtacaaacatcaaatcatagtttaaaaatgtaattctaatgaatatatattatctttgtttatttcacttccattcatgtttcctgttatttggcttaattttaacctatttcatccaagttagctctcatatgcagaagtttgcaggtcagttaatgtcatgatgcctcaggtcttctgacttagcatttaaaattgggctctggataattatgcatattctcagagaatgttcccaatagcaacacaacacagctgctccaaacacccagaattcatttgttaggcagatttttcagctgccagccagcgctctcacaaaggttttacacatagcatgccaccagcctggcatgtctacgtctttgtcacttacttttttgcatgccacaagagttgagagtcattctaagtttatccacatttgggatcctgcttttaatgtggcagaaagtagcttaactggaatgaagtatcatgaaaaagaaaaggactcttggtgtctggaaaataggaatttaaatcattgaaatacgctgatatctctcgaggcattttaacctcagtgttctgtctttgacatccagatgaattctgaccagcacgtctttgcacccaacaagaggaccacttgttgtggcccatttctcagctgggaaatgtttgcagagatgattgagataatagagccatgtccgaggggaagagcatatagatgaacaacaaagctttattttgtagactgttttttgtttgcttgtttcccaagtattcttaaacaccttgctaggctgggtgcggtggcccaaacctgtaattcgagcactttggcaggccgaggcgggcggatcacttgaggtcaggagttcaagaccagcctggccaacatagtgaaaccctgtctccactaaaagtaccaaaaaaattagccaggcgtggtggcataggcctgtaatcccagctacttgggaggctgaggcaagagaattgcttgaacccgggaggcagaggttgcagtgagccgagatcgtgtcactgcactccagcctgggcaacagagcgagactcgcattatctttaaggcagtatacaaaagggagcaaaggtgcatgttatttcattttcacaagaggtcaaaaacctagaagtttcaagcttcctgtcaaacaatatattagcggtatcttagcatcaagagacagaaagtaggatttcttaataaatgtgtggagtttaatatttattagagtttccactgaagggaaaaagtacataaattactttttcttctattttattttatggttgtgctaacttaattatcccccaaatatgagagtctgccaaagaagccaagatttctgtttttaagaggataaaataagaaccaagatgcacttcccctgaattaaaatgccatggagatttgagttcttttacttggtgtttcccattggagaagtaaacttttttttgaactgaattataggtttcacatgattgtacctcttttctaattgttttcatatgtttcagcactcagtgcttgctttctgctagtctgtggatcttctcaaccacgtagtaattaattacagaggggaaaacaaggcagggggtgtgggggcgtaaaaaaacctccgaggaacaatagacattttagaaatctttagaggaagagcagatgcagctaagtgccagacatggattcctctacagccctccttaccaaacgccggttcaccgtggctgctgaacagatccttgggtatcggggaccagtcaggcacataacttgcacgaacctttgtgactctggatgtattagggcggtgcacaagtaattgcggttttgccatttttaaaggcaaaaaccgcaattacttgtgcaccgaccaaatagctgccctgattggagatggggtgaacagggaagtttccagtgtcacccaggacattcccagggggactaacaggcttttctggagagcagagtttccttcattggaacacactagctaccaatctgacctggttgcttatgcattgccacataaaaccgggtgaaagaaaacaccagctcttccttagcttaaatcattacctcattcactttgaaatatataagcctcagaaatgttgagacaagagcttttcttccccctcacctgctttgagtccgtaatccctcctaccaagaaagctagcctgcctttctttaggtgaggctgtgcaggatcgccagttggaggcagggcttggcatttctcgtttcacattgccacactgtattccttccacatgaaacagtgagctgtgcccccaaagcaactccttcttcccaaagctactcatctatgagtgacttggacaaaataaaagtgccaaacctcctcatgaatataaagccagacagcctggcctgccccttgagtatactttaattaatttacctgagttcagatggcttgagctagagaccttaatattctcttctgcaaagtgggcgtcataattcctattttgcagggttgtcatgaaagttagtgtatctggaatgtactaaatgtactagctactaagagttgtagttattgaaaaataaagtaaaacagacccaagtttcacaaaagactgtccttaaggtccttcaaagaaaaaaaaagcacattataaaagtcatttaagtattttgatacctagacacctgtgaatacaatcctacatatctaccttatacatattatttattatttcaaggccaacagggccagctcaaaacttgtatcattattttttgctcgccgtgaatctgccttgaagctctgaatttaaaagactcaagcaattagtggaaaatcagtcattgtgacaacttttcaagtgggtggggagtgtcttcaaatagccaatgatacggaaactttcttcacgctcttttttatatatttttttaagtctgcatatctaaattgagatcacttgaaatgagtcttgccacactgggcatttagcctaaaaataaacacccaacggaatttgcagcctggctgggttcacaagatgcacaagggaccagattctccctgctcaaattggcatcgcaaattggcagggtcatttgcataaatacgaatattttattccaaaaaattctgcccaagttgggggaggttggagcccaggactgtttggtttgtcccaaagtggaaagaatgttgctcttggacttcaggggttcaagcagaagatctgctcccaaattagggtatgagagctatgattgcaccactgcgttccagcctgggtgacagaacaagaccctgtctcttaaaaaaaagaaaaagaagagaggtggagagacaggaggatagaagagggaagaaagagttgctgatggaaaggtgcagggcaagataagcttcctgggagtggaggaccagggaatggaatagtttaagaccatcctatgagtggtcgtaaactatcccagatgtttcaggttagctcagctctgaagaaagacttccttacattttgtaatctgttacacattctaggtgtggtgtcacacagctgcattcatttgttttcccccagatcagtttcttggtggctcaattttttgccctgtcagtcaaaaacaaattaagtgtctactgggtactcatgtgctaaagaaaaaggaacagtaacaaaaagcttcccatttttccccaatttcatgcaaagaatctgcactgtcactttcagagccatttaggatcctgcttttctgttgctggtggaagccctgaaaattaaatgaatttttagtattgctagtgtctggctaaattcaaggttttaaaacccaccctaactatgctgcaattctagactgaaataatgaacagatgtcatttgaactaacaatatcgagaagacttttcactaacaacacagttgtctgtctagagatggagatttaattttttttgtctgatcacatgtggagtcccatttaattttcccctatcagtcaaaaacaattaagtgaagagaaagaagctattcgtgatattgtccttcgcaaagaaaactctttcctgacccaccaacatggcaacgattcagaggcagaaggtgaagttgtgtgtcgactgcctgatcttgagaaggatgactttgctgcaaggagagcaaggatgaaccaaaccaagccaatggtgccattaaatcaactcctctatggcccttatccaaagaaaggggcagagaaatcagatggcagcaaacagctctcaaagggaatctcaaaaaaaagaagtctagaatataaaaggtgtgcatggtgtgtgtgtgtgtgtgtgtgtgtgtgtgtgtgtctatgaaagagacacagggagagaggacataattaagtgaagtcagtttgtattgtaccccctccagttcctctttccagcctctcaattatatgtactttgtaatgggggtttattttgaagcggaactttagatattcaatctcccttaaatgcagatggcagacagtagagtgtccatgtccaaaatagggctgaatttgccaaagaaacattgaattccagtgtgtagatgtgctgaatcagggctcatcaccacatatgggtgctggtgtcatcagttggcattattagcaaaaatagacatgtactattgcctatcagagaacagccacctctcacagctgctctagtccattcaaaggaagcagaaaaacgctaaaagcacttctctcttattagctacatttagatgttggaagaaaaaaaaatgagacttgttctttcttctgtcacaccagcaacatcacctagacaaatgataatggatatttcccatcaaaaacacttctcaaacttatacttctatatgttctgtcatagaaattgttttcaagccagtttccttttgccaacattttccccgtcctcttaatacatgttggagtgaattggggacaggaaaattatagtaagatggaatttgaccagtgatttttgtcctgagagggagatatgatttcatttagggaacctacttgctgaatttcatcctgcagagttaatcattcttgtatttttccttatatcaaaatcagctagagttagcatctacattattgaattgtcatctttttgcccatcactttagaggtttttaagcctgttgaacttagtatataattatctcagctgtgctttagacaattaaaatggttctttaggcagagttgttgagctcaggggagtagttggtctttttgatttttcttaggaagtaccagatacaaaaacccatgagggattcctggatatagaacagggattcgataagagaaaatctggcatcatttctttacaggacacattatagcttcaggaggcccttggtctttgccattgctgttggcaggccttgtaacaaaccattcttggagggccttgtgggagggatcagttgtgcaagtgaaacaaagacttttggataactgactaacatcaaggcatattgatggcaatcagcaatttgagtcaggaaaaggactagcctttgtatctcccttgtttcctttctcctccatgtaattttaattcctgatatttccagctatatttgtctgttgtcacctgactctgtgtttgcggacgcagttctgggtctgaagcagcccttgacctctctagacagcatcaaagaacttattaaaaaaaaaaaaaaaaagaagggtccctagtgcctctttgccatgcccttccttgatctccttcctcaaactaagaaaattctatagcctttctatttttatgggctgtgcaagcatgccaaatcatcaaggtaacaaaagactacctcttgattttccagcttgaatgatatattttgtgggaagattaataggctctatttatatattttttgagatttttctatttcaagaagcatatttagttagaaatagacttttaatggaatatttatatatataaatgccacagctttggtttaaatcgcagttttgtcaacattagccagctaaggttcacttcataggagaacaatggaaaatatcagttttagcatcaataaaggtgaacggttattaacacaagaaacaagtgggtattgaccctgtcaatccaggtaaagaggaataccctctgcttttcaagtttgcattagccaaacctgactaatgccatgaagcagacgttgagtttaaacattgaaactttctgttcagaattgacttagatgtactttctggcagctgtgggtttaggtttgagatgtttaatatgtgaacaatgttccagctatctccaaactaatcctagaatttggatcatgcagagctcattatgaacattttactaatgcagtaaaaaacattccaagagggctaagggattcatcagaaaacccgaattcattacagtaacttgaatagtgtgggaattgggcatcattaccatccaaccaaaatctcattaccattagtaatctttcagcaggcacggcttcttttcctaaactgtagttgagactgtcatctggaaggggaaaaaaacctctgtctcattcagagttgtaataagggtggtatagatgaaagtcatcacagctcccgttgattccatttttgagaaagagaaaagtgtttccatcattttgttctgtcctcagcctgtgagtttccatgcttgacattctctttgtctgctccccttccttgaacttgatttttccattggtgtgggggcccggatcaaatggacagaaaccagggccacacagaagaggtgaagttgatagtgacctgtaacatgagggctcaggaaagtgaacctgtggaaggaggactcaggaaggtgccagatcttcacaaggatgacctggcccagcagagaattcagggcagccttgcccctcaccgcgagcccccgagcttcattacgctctccaacataacagaagctgacttggagacgtgggagagactcaaagtgtcagaaaaggcgaggtgtgtcatgtttcccccccagtttccccctggcagtcatggtatttcattttgaaggcatcaaatgcttatctttgtgtcttttttttttttgtcagggtcttgctctgttgcccaggctggaatatagtggcttgatcacagttcactgtaccctcgactcctgggctcaagcagtcctctccctcagcctcttgaatagctgggactacaggcccatgccactatgcctggttaatcttttgattttttctagagacaaggtctcactatgctgcccatgctggtcttgaactcctgggctcaagggatcctcccacctcagcttcccaaagtcttgggattacagatgtgagccactgcacctggccaaaattttaattaattaattaatttttttaaatagagatggggtcttgctatgttgctcaggctgatctcgaacacctagggctcctggggctcaagtgatccttccatatcagcctcccaaagtgctgggattacaggcatgagccaccgtgcaagccccttgtatcattttttattttgatggcttgaaaaagtgcgtctcacatcacagagctgctggagctcagcatatgcagcatgagatgaatttattaatactaaaagttacaaaccacatggagagaaaacattctctttttaacccagccaactttctaagaatgtttatttattttgatagacttgtttactgtaaataatttaaacttgactttcaaataattttaattattccacagtacctaagattttcttatgcccttgtttatgatgttagagatgttagaattgatgttttgaaagctatagaagcttaaagacaaggtaatgatcatttctaggcaagacaatgatcatttctccatttgagtgttaatgaaaaagcaattttgctctagccttaaaaatatttttcatatacagtcttccctcagtatccgtgcttgattccagaattccccttggataccaaaattcttagaggctcaagttccttatatgaaatggtatagtatttgcatataacctatgcacatcctcccatatactttaaattatctgtagattaccgataatagctacattaacgtaagcataccttatacgtgtatacctaatacagtgctttcacatcactttattcatgtggattcagtgtagtacttagtgcacggcaaattcaagttttgctttttgaaactttgtggaatttttttctcccaaataatttccattgaggttggttgaatcccgtcagtgggatgccgaactcactgatagggagggccaactacttctagtttttttttttgttttttttttaaaaacctcttattgatttgtactcagacacttttagaacttatttctggttttgactagggatggagatgttcagcacatctgtgcttctgagccttccccagaaattaaagcagaaactgccattcgtgatgactttgccaaccgcaaagcaagggcctctaagaaagcttccagccccaggcaaaagtttgtgcactttgggccagtgacggagctagatcagcagaaatggaagcggcttagcattggcaaggctgggcctagagaggatgaagaagaagtcatctgtcatggcagcaagattcaaatggactctgtgtctcctgtctcagcggccacttccagcttaaagggccaccaaatatttaatcgacaaaatgactgcaggtattttttgccatacgtgtgcaaggatatctgcatgggagtcactgctgcttttgtagagtttgctgaagcacattatacaagcccctagagatgacatagttttaacagactatgtatagcagagaagtaatgttagcgggtccccctgcggggaacatgtatgtgaagttaaatggcaggcatccattttgattctgttgtcaccagaatcactgcctgggaatgccaataatcttggcaaatgaccctttttcccttggctgcatccagtactattttattagttgaaaataccaaatgagctaaatggaatgttttaatgatatcagtagggtttcctgggcttatgtataacctctctctttcctgtcccttagagagagaaagaaaaagttattagtatcatgagttcacgtttcagacatacatctaagtagacatattaaaaaagtaaaggtctccttcctcccccactttttaaaattatataataaatcaggagtcttaaaaacctcctctttgggggtttctgtaagtcgagagtttccttggatgaatcgctatccaaatgtgtgagggaagaacacctttataggcctgtctcagttctcatcctccctggaggccacccagttttgagttcccaagccctcttttggggatttggttctgtgggctggtctgtcttccaggaaacacatataggacatgtgtaaaaccggattgccctgggaacctccattccctctgtacagcaggagcaaagtgaggctctccgtagcaggaagaagtgttcatagcattcttctttataccttgcccttgaaatccaaaggaaatgatggatggcctatgacctatagaagggtttctttggttccagactcggggtgacaccatagaagagagaaggctataaacaccagaaataaagagttgaggtttcagaggatggtggggatctggggtggggaggagggggtaggaaattaataagaaatacgtcctcgaggccttgaatcctgagaggcccatcattcagtcttgtggtgacagagtcacacagccttgtttgaccttcataggccctagccagagttcacattccattatctcaatctgattatatcatccttactaaccagcctttggaatgagagcagccacattcttctcttaatctttcagtcccaaggactttcactgtcttctttcgtaacccatgttcctctcctctcttgccaccaatgctacttgatcgtctgcagaacaatgaattgtggccgaggtgactattgcagaagggcctcgtggctggctcctgtgccggagtctcaggaagagtgggtctgcagtttgggcgagtgcccgagggggacagaggaaggtgaggagcagtgtttcctgccttcccgggaggtgaaggaggacaggtggggtcagagcctctggtgtgaattctttcctaggagtgaaactgtcctctctggctttagttacatccaaacagctgccacaggatggcaaagaagaaacagaaagcgctccaagagattctgagaggctgtcaaaggcagaaagatcagaggacagcagccagccactgtgagcatcttgcctgcgctctgctccgtggtgtgttgcccctgctgtgtgtggctgtcgtgttcccaaaaaaacagcttaaagtcacagtctgcacctggcgactgatagagcgtggagtaaagtcactaaaagagtgtgctcatcccaagatcagagttctgcttctggtgcccgctctgggtagatattttagcctttgcatgtggctgagtactggccaaatttcattctcaggactcatgaaaaccagaaagggacccccattcctgtgtgagtatcagctgcatgacagagggtcccagtactcaaaagggagatttcctgctcagctgctctgtgtgccgctgcctccagggatgctggcttcttctgtcttgaattaacgccagtgagtgacactactgaaaatatctttagcagtaagtggcctttgactggctggactgaatgttgccctagggtgtgtcctctggcctctgagtgtgaggcttcagggacagaagagaagttggagaagatgacagctcctgcctggagtggcagtggactgaaaggccagcgaaagttggatgattcacgaaaagatgacatgatggccaggagaactgggatgtcccttagacacactggatccaacccaaaccagttccttccagttccatttgcaaagcaacaggatgtggaagaatcttctaaaggtctacccatgaaagatcagaggtcagaaagttattctgtgcccttgtgactttgtttctccagtctgagctttcagtgtgttcttaatgcattatggcacctcagtgccgcttacctgctgttgctagcagaaacagaatgatcaaaattggcctcatctgcgaagaaatttttcctctttttacatgtaagcaggtgtgattcagtggtgaatttacctgttaaacatttttttctgactcttgtggactgaataaatgggaaattcttttatttctttctagctcacataggagcctttgggcaaaggggttgaacttctatctgacttacttgatttcactttgattccaggtccaaagaagatgaatacatttataaaagttgtaattatattaatttttcaacattagcaaacactcgttgccttctgcagtaggatttctattccatgctctgacttgacttagagtcaaccatgacttgatgacgactaaggaaataattatcctggggttcctgttccagtttagggtcctatatgttgaagcctgtcttgccatttaataaaagtgatacatttttgttaaatgtatggtaagcctaccaatgtagggcaaagaagtgaggagggctttgcataatttataagctcaccataaaataggaagcaatggagttctgcttctccaaggaccctgatggcagtgggagagaaggcagagtgggaggcaaggagaacagtaggtaatctctccagatttttaaaaaatcaataccctagccatcttgatcacctgaatttaatctatattttacattcttctgaataaaacagtaatggagcctagcactgttttcagggagcagaagtaatatttgtgctttacaaccacagagtgctttgtagcgtttcctgtgtgtctgctccctcaagctcaccttgtcctgggaattcacaggtaggttgaaggaatctatgttagctccatttcacaaataagaaggctgatgtagagaaaagctgcgtgagtggatcacacatgattcccgagctggttaggactgggaagacagaggaacagagtggtgaagtgggtcctccacagttactcactttccagatgccctggacttgaccctggatccgcgggcttctgtaaagcaagttagaatgaaaggaaagaaggaggtgaggcctagagactgcctactggatacatttaggcgctctcccattcatttattccttacactacctttgagaggaagaattttcatctgcattttgcagttaggaaactgaggtccacatgtacacagctggtacctacagagccaagatccaaactcagctctgtcagagtggaaaaccagcatccctctccagcatgatgcctacacgagtaactagaggagactgtggaagcctgaggaattctctgtcactttttttttttttttgagatggagtcttgctttgttgcccagactggagtgcagggcccgatctcagctcactgaaacctctgcccattcaagcgattcttatgcctcagcctcctgaatagctgggattatatgcgccctccaccacgcccagctaatttttgtatttttagtagagacggggtttcgctgtgttggccaggctggtctggaactcctgacctcaagtgatccacctgccttgatctcccaaagtcccgggattacaggtttgagccactgcacctggcctgtcactctttgtgattctggaaagattcctctttattttcacatgggaatggacagttactctgagcacagggaggaatggtcaggtgaactatgtgacatattgtgtgaatgagccagcaaacactgtcggtatgcacatttcctatcaacaagtgtttatcaagtaataatcactatgtgtaaagcactgtgctggatgctgggggtgatcttagatgagcagtaaaaacactttaagctaacgctagttcatgatatagaaatagataactatcaaattattgattctgaaatgctttattagtagtgaaagttacataaatacaggcaatgggtgcataggctattccctttatctttctacctacccctaccctcaaaagtaaactttattttatttttttgagacaggatctcactccatcacccaagctagtgtgatcatagttcactgcagcatatcccttccagacttgagcaatcctcccacctcagcctcccaagtagctgggaccacaggcgtacaccactacacctggctgatttttttgtttttattttgtagaggcagagtctcactatgttgcccaggctggtctcaaactcctggcctcaagtgatcctctaacttcagcctcccaagtgttgggattataggcatgagccaccatgcctggcctcaaaattaaactttattgactttttttttttttttgtaggatgcttttgtcaactgtgacctgcgtggccaatttttacctcataacctattgagtcacgtactttgcattggaaagattgctttattacttttttttttttttttttttgctaacttgcctttactttttgatctcctgtaggatgattgggaaagtcacttgacacctcagctctaattatcttccccttgccagcaaaggcaattctgcttaagttggtgcccttttaaagctaatacaagtctcagaggaaattccttaaacccccagtacatagtaaagggataaatgaaggttatcttcggaaactgggctattcttttctcttcaatttctagagcacctgataagtatttaataaatacttattgactagtctggccactgttcagggaacccaaacagaaaaatctctgcttctgtggggcttacattttggtatagatctacatttattggtagagatgtccatgaaatactgttaattactttgtgtagaaacaacttaaattcagatatatcctacatgcaacaacatagttgaaactcacaaaatgtgctaaagaagacaaactcaagagtacatactatttgagtctgtttacgtagtacaaatcactcaacgctaatctatgcatatgttcattttgtgaaaatgcattgaagtatatgtgtggtatgtgcactttctgtatatagcttaaacttcaataaaatgttaattaaaatattcaaattgaaacacaaaaacacatagcaactattaatagattcttgattaaccatccattgggaagaaattctctgctctcttccatagataacttagaaaacactgtgtttgaataaatgtattccaataggcctatttattaactgggaaacacttacctagtcttcagaattaatattgcccttgcactccttttccttttcctttcctttccttttcagacagagtctcactctgttgtcacccaggctggagtacagtggcgtgatctctgctcactgcaacctctgcctccccagttcaagtgattctcctgcctcaccctccagagtagctgggaccacaggtgtgcaccaccatgcccagctaattttttatgtgattggtagagacaaggctttgccatgttgcccaggctggtctcgaactcctgagctcaagcaatctgcctgccttggcctcccaaagtgctgggattacaagcatgagccaccacgcccagcccactctctcaatgtgaaagaacccacttgtcatctgcttcaatgcagtagtgtttttgaaaattgagaatattaggttcaacttaagcaccttccgaaacgatactctggagaaggagaaaatgagtcttactgccagaagaaaaacattcataaaccctttccttgtcttgtttttggccatttcaacagagatttggggttttgcattggtatggttgccttcactgtgaattaaatcattatcaatgaatgtagattattctagaatgataaaagcataagagagaagggggtatgtgtgtgtacactcatgcattctggggtgttttctctaagattctctaagatttctctaagattgcaggaagagatgtttagaaattacccttttcctataaactattgtgaaactgatcatgggaccaggtaatttttgctgccgactccaaaatgtaatttattggaaactggaagcaggacgtattttcttcactattctttgtccaccatcagaattgcagaaaggaggagcttttcagggtataggtaagaactgacccttaaaactcgcctttgctgaagagacaggcatttgtgggagctgtgttgttttgttgttgttgttgttgttgttgttgttgttttttcatgtgctggaaatatggcttgtaatgttctaatatttttctaatttagtctttttgctttagactcatttagacttccggtgactatcgcagagggtacaactttatggatctaaattatcaggagaatataaaagattagaaaaaaactttagtttttcaagttatggagtatcattcaagtctggttttgattaaggctaccagttttctaggaattgtggtttctgtcaaatgcatgcggaaggcactgattggggttctggttggagttctggtttcccttcagaaaactgcagaaacactctttgatgttatttgtgcaaatgcattaacatctcagggacagggtcagtaagggtgcacttgtacagtgggtgtccattacagcccattactgctgaacataaaggcacaaaaagttgaactgtttgtgaatgactgtaatacatgtttgttttctaagctgccttctctaaacgctgtggattgcacctaagcctttctgtgtttatattgaacagattctttctttttgggtagtgtggggattattttcatttctcttctgggttttgagataaattttgcattttttagaaatatcaagacttgtctttgatttttcagcagccaatgaatattgctaattgtataatgccatttctctttcagtatctcagcaaaaaaggtttggcgcacatgtatttcaccggcagtttctatttccagcttgcttacagtgttcactttcaactctgccagtcctctaattttttatttgatcttatagatacggtccgagaactcctgtgtctgatgacgcagagtaagttgccttgtatttgtaggattacattaattactagcctaaactgcatgcttccagtacttaccactaattgaaatgcaactgatgcaagtgaactgaatagttagctgacttgtgcagcaaagcacttgaagttggaatgcagagcatacattctgtgcaggaaagatgaatgaaaaagcaacttaagcatgattctaatatgaagctgctgcttgaaacttaacatttgctttccatagactgggcatgttaaagtcgttgttcttgttatggtctgaacattggtaccccttctgaactatagatttatttaaagggcattctgagttttgcacttaattcttgatatgttggggcttagagttaacaatgaggtagtcattcccatagtctcattttttaactaagaaaataaatcccaaaccactaattatagattcagaagcccaagttcctcccaggttggagtcacataaactgtgggatgcttgagaccaaaacattggagttttgctcaagtcccatggcttagcagggggccaaggatgtaagacatgactggcccttcccctccctgctgcttggttttcactcaaccaagcagaggttcattccttatcccgtactccacatccaaatttgagaagactccaaaccctcccatttgtgaccacattaactctgcttcagaaatggatttcccatatgcagatcattctgcaactgatattcaaggcaaacttttttttatttgcaaaatgctagacttctcagattcaagtaatttgtatttgaagaaacatgattaatatctaaatccagcatcagtagtctgctgatcctgatattgaggagcattttgtggcctcgtgggagcctgggccatccagaatgtaatcaccagtcctcctctgcctatcctttcctgagcctcagtttcaagtcacacaatgaggaatttgaatagaatttgcatgtagaacatgcaaacatcatttccaccaatgacaatgagattaggcaaaaaattaagtgtcttcagattgtgctattttcatgtttgtgttcaagatgtctgcttagtttggactctgagccctaagtggtcaaactccagggccaagtttcccatgtgtgatctgacataaagaacactcatgcctcaaaaccaaattcagcctgagcttgactgactgcacagagttaagtagtctgtaaaattgagccctggttattacttttcaaacctgcaatggcaatatttaacattcactgaaaggaggattttataagattgacaggcaaaacactactttggtttggtgagcgaaaacattttgatagaatggatttcttcttcatcaatgcaaggctgctatacaatttgcttaaaatagacccctgggaaaggtgaaagaaaggaagggaaattaaagagtttctgaattttgccttcacctgaacacaaaacttcacccacaggaaaagttaatgatttcttaaaaggggtggggacagggactcccttcttgccttctctaagtttacaaaatgcagccccagggaccaagaagagtaaaaggagctttttttccagagctcttatctagggatatccaaagtgctgagtttcctgcttagagcagatacaatttacatgaaaccatgtggggaacaaaatgaaaagttgatatcaggaatttattcttaaaatagaaacttatactatttttagtttattcccttaatatctcctttttccaaaatctttaaaggcagttttttggcacaggctatatttattaataattgacacattcttaaaatagagcccaatcaaaaaaaagatgagccctttaaggagaatataggtcaggggcagacctaccgcacaggcaaacagagaaatttccacctcctaaccagccaagaatgtttccatagatttaatttcaccttcttgcccttttcttcactttcacactctttccctcccaatacctggcccaccaaaggagtcggtacgttgtgagagccataggccattttattctgaattcctttacggtagacttggcccagaaacaatttccaggcccttggggtaattccatcccggccctcaaaaatgccaacccaccaccaagggagactcctggactctgcagccaggagccctcatcccaacagcccaagggcatagacgtaggtactgaggagcacaggattagtccaagtcacattaatattctggaagctggccatctccaggatcccatatccgccaacccccatccccagacacacacctcttcatttgggaggccaagtctaacctgaactagggaacatgttctgaatgacaactcagcccattttctttctagtattatcaattctcaacttcttaatttttttttgaaaatggcataaatatatcactcataggtttgttatttcttttttggccagtttgctgatatttcttaaaaaaaaaaaatcttgagaaaaaaaatcatacaggttgagcctgccttatagaaaatgtttggaatgagaagtgtttcagattttgaacttttttagattttggaatatttgcatatacatagtgaagtatcttgaggatggaacccaagtctaaacatgaaattcatttatgttccatatataccttatacatatagactggaggtgattttatacaatagtttaaataattttgtgcatgaaacaaagttttggctgcaccccatcacacaaggtcaggtgtggaattctccacttgtggggtcatgtcagcattcaaagagttttggagtttggagcatttcagatttcagatttttggattagggatgttcaaccatgtacttcctggtacatgaaagggcaaacgagtttctccttttatttaactaactggcttctggccacatttgggctgagctagttagagcttcacagtgggagtagagatgggaacgcaggacagacaaaggtaattcttaaggtctgctctcattttctccatgcccattgggtgagataatcaaatcccagatcctggagaaggctgccattttcttcttggggtcccagaagaaaacctggatctatggccacccatagtggcctaaaccaaaattctgacctgtagatattatagatggcagagttgaatgaagggacctcttttctctcccataatctacaaactacttagtgggatggtaagagggtcccagctcagagaggtttaagtcttctaagatcttagcaaagattataaatcaccttaaaagatgaactgactagattgaatattttaaaagtaagattttttttttttaaactgtgagaggaagaatgggacgaatttttgtgtctttctggaaggcctgcttaagtgaattttgatccatgaagtttaaaagcatgggttagacttttctacctaatcctgcaaatttcttaatctttcttagataccattaatcaatagtctaaaatagatgaaaaatcacagcccttctcctctatcgaggactacagtttctttctttttcttttctttcattctttattttattttatttttttgagatagagtctcgctctgtcacccaggctggagtgcagtgatgtaatctcagctcactgcaacttctgcctcccaggttcaagccatcctcctgcctcaacctccctagtagctgggactataggcgtgtgctagcatgcctaattttttttcttttttctttttttttttttgtatttttagtagagaaggggtttcaccatgttggccaggctggtcttgaattcctgacctcaagtgatctgcccaccttggcctcccagagtgctgggattacaggcgtgagccaccacacctggcccagcttattttttctagaagccacagctgctgaaatcaacattctccactgaatacatggaggcagcattatgcaatggcttgtcatatccatgctaatagaaacctcagctaagagtccttctgtgcagccagattattagaatactcttggggaagacaggttacaagtacagtttttcagtttagttctcttagacttaaattgtccaacatctggagagcagagagaggcactcacacatttatacacattccttttgagtggattgaagggaaggtgggcagccattgctttgggggtcatcttccagacagctgcctgctagggagccctttgcattcggcgatgctgctgctgttcattgtctggccatgggagtaacaattttggacatcattgatgatgtctggaattctttggtgtctaagtgcatggtagttttttttttctttgtgttaggctggtttcaaaaatggactgtcaccatattttgttgctagcacttaacagtgagcttttaagagccctctatgtcttgaattttgggctccatagcccacttgtcccaaagtgagtcatttctttgaaagaaaaataaaaggaggaggattttgctttggtttctatttctgttttcatcttgctgcttcagcttttgctgtaacaaaggtttatgtaagcatcacaaaaaaggccctatggtcttgcacaacatttaataagctcctataaaacatataaattatatgtatgcacagtctaagagttttttaaagactgatttcccttgcatttttcttttaaaagagatattcagagttatcctgacaaaaattaaatgactgtgtgcatattagaatacaaaatatatacctaatttatgtgttttactccttactcttgttataaaatgccttgttttcttgattccaagatgccatcaactgcactatcaattacagcagttttacaagaaataaaaagaaatgattacaatgaacatatacatcagccatccatagttgtcagatgcatctaaaattcaataaaataaaataagaaaaagtgagtgtcttaaacttaaggccaaatgatatttttttggaaatggagaaattgcctccattcacataggaagcctttaagccagctttctacacaaagaagcatttaacgtaatacagttttacttcatggaacaccgccctctttccccacaaattctacccaggttataccttttaattatcttaattttattttttaaatgcatttccaagtgagaggagcctggggcttcaaataccatttttctagctcttctttaaacctattttggcacctacatataaaatgatattgacccgattcagtgacatcactgaagacaaagacggtcacattttggcgtttgcggcaaaaggaggcggtggggtgccagcacgcccaccgcccgcccagggccagaacacaccgccagtcacgcgctgtgcgcagcccgggaagggggcagttttccaagcccggtagcgcccccacgcggcaggacgcccaggcgcgcggagacgcgacgggcgctgatcgcggtccctcttgtgttcgctctctccacactcaggagcaccagcatgtttgacatgcggtgtgaggaggaggccgcggtgcagccgcacagcagggcccgccaggagcagctgcagctgataaataaccagctgagggaagaggacgacaaatggcaagatgtgagttgtggccaaggcgcgcgggcagcggggaggcttctggcagcagaaaatccagccgggtgggtagacgtggacttgaaagccatgcggggaaagggagcccctagagggtttcaaaaggtgacacggtaaatgtgggactcaaaggaaggtgagtagcagcgtgaaggtatggagtgatggcccagacatgtaatcagcaaacaccctggccagaagcttggtcacaaaagaggggaggggaggcaggaaactgggatgggttgtagaattgaggctgcactatcttctgaggttatatatttcaaattgatcatgatgatgatggtagtaacgataacaatgaccaacatcaaatgtgtaccagtaccaggcattgttctaagtactttgcatgcattcatttaatcctcttagtaactcaatgaactagcaactcttattgtcctcgattccacagacgaatcccagcacagctgtcacttgctgaacgtcacatagctagcgagtgggggagccaggattagaaccagggaaggaaggctaaagaggctgatgagggctttgagattgtgtgctgagagccaaagcggggagagaggagggagagtggattatttcatttaattctcacaaagcactctggaggtagctattgcaaacttgactccacctttagtttaaaaagttaacttctccaaagttcataaaatatagtaacaattatgtctaaagtatcttgagcacttactatgtgcctggcaccttacgtctattttcacatttaaccctgcaagcttgtaagaataggtgctattatcatcattttagagaggaggaaatggaggcacagggagactaagaaacatgcctgagattccaaagcatggaaaagacagagctgggattatttcccacagctgcaaccccaaccatctgcctccagaatcctcactcttcatcattatgctataactacctgtaggattgtggtgaggttgttgtaaggatcagatgaattaatacatatagaatcaccagatctaaagactccaaaacagttttttttctgccttgactgccttccatgtggaaactgtaaatgaatccctactattctattgtcagcaaatctgttcacaatgcagaggttataaataggaaggaatgaagtttcttacagttaccttgtgaggcaattctctgaaatttggcaactgacatgaaatgtgattgcatatttcacactgccatatttaaataaatgtgcagccctgctatggatactgtagataatatctggatgtttctgcctttgaggcattccagttccaaccagacttacattggattgtgtgggaatgcacacgatgttatagtgcctgggcccatagtcagttctctaaagagtagaaatgactaaactctgaagaatagaaatggaattatgcacaagtctgaagaagaatattatatctttctttccctgccaggacctggctcgttggaagagtcgtagaagaagtgtttctcaggacttaatcaagaaagaggaagaaaggaaaaaaatggagaagttactggctggagaagatgggacaagtgaacgaaggaaaagcatcaaaacctacagagaaattgttcaagaaaagtgagttctttctgttgtcgtttttaatgtacaatattatctaggtgttttttttttctaaaaattattggctgtcacaaaggttctgatagtaacattttatattccctgtactatctcttcagtgctaccttcgtttctaccaaggtcttctttgcaattttcattagttgactttgttattgcttctcccatgtcctttagagagcggagagagagagagctgcatgaagcatataagaacgctcggtcccaggaggaggcagaggggatccttcaacagtacattgagaggttcaccatcagtgaggctgttctcgaacgcttggagatgccaaaaattctggaaagaagccattcaacagagccaaatttatcctccttcctgaatgaccccaatcccatgaaatacctgcggcaacagtcactgcctccacccaaattcactgccactgttgaaaccaccattgctcgtgccagtgttctggataccagcatgtcagcaggcagtgggtctccaagcaaaactgtcactcccaaagcagtgcctatgctgacacccaagccttactcccagcccaaaaattctcaagatgttctgaagacctttaaggtaggacaagttccttaagagtagaaccaaagctgaactccagggagtggatggaaagaagcatcatgactcaagaaaatgtcattctttttaccatacaaaagaaaaatgtgttgacatttacagctgtgaaagtcataggtctctggagatttggtttgtaaatgcttcagggacagctgtttccctcaattgctgttgttaatacagatggactcctataagactgatagtggagtcgtctccatgagcaaggtctattttctagtttgatataatggcatgatttctctgtactagtggtaaaaaccctaatttagtaataccctagtatttctaggtatcaggaggtatggcagactcctcaaaacaaaattttatttgcttttggttcaaatagaagtatatgcagctacctctcttttaggaagaaattggcattcagcatccatttgacattgtagcatccaaaaagattttacaattgataaaaatacaaggaacacatgggaacatgggacatacttggtcctcaaatgagacaggttttttaaacaagtggaaagaaactgggttgttttgctaatgagtgtgtaaaatagtgttccagactgaagaacttgtggaaaccaaacatcttttcgcttcctcaaattcaagtactttctcttatatcaggaggaagcactcatcctttgtcttaagttcttttgacttgtaaagaaaaatcagttccccttgtccttgcactcaatgagtttgtaataaacagaggtggaatgcatcacttggagatgtgaccattagatagaaaagttttcgtaactgattgagcagtgtgatgccacgtagcttccttgctgtatttcaaagagaacaaaaccacactttctgacttttgctgaaataactctgaatgtatctcaaaaatctctatcttaggctttgatagaacaaaaatgtccagactgtctcatctggatcacattgagctgtttgtccccttataagggcaggggccatgtctctgtcattcatggcttcatcctgagagcctggcacaggtgcccaggacagagtaggcactcagcaagtgctccttaaataaataagtgaatttttcctgagaagatgagctactaatcatatggactcacacacacacagatagacacacacatgctcatgtgtgctcagtggtccacctaagtgtttcagaagctttccttcacctagggcctatgataatgaatggctatggtatttcctgaaggaagattctatgttgaggtggcccagaataggatagagaatacatttatttaactggatttccaaggcatctgaccaaacattctagatgtccactttccctcctttatctaaatagtgcaaagtgatcgtttaaacagaaggattagcataaatgattttatggcagaacttcagctctgagaaaactctgttcttcaccatggcggcaaagtggagcaaggtggtatggcggcctcaggaagcacttccatggagggggttattagagaatttgagcagaggccctcttagagctggagattactcctcatcactcactagtgggggtcccctgcctcattgtaggcctcactggctagtatttctactgatggcctacagttccattactgagtgcatggacagcaactttggtcaaaggtcaaagtaacatgcaaatcagaccgttgttaccagctaataatgccaggacagaagctaaggggtaggggtgtgtgtgtgtgtgtgtgtgtgtgtgtgtgtgtgtgtgtgtcttcttggagggcagggcagggaatacaggccccgttgtttttccagtacaacagaattaagaataaaggaagatcaagagaaatagtttaaggcagtgtttttcaaactgaaagttaccacccgttgctaggttataaaatcagtttagtggtttgaagccaatataaaaaaaaaagaactagaatagaatataataaaaaaacatagtgtgtcacacaatgaaggcaaaattgcttggggcaacttctgtttcagttatatttatgtgtgtgtgtgtgtgctgagttgtgatttaaatttctttttatgggtaacaaataatagagtaaaaagaccagtggcttaaggtaaataaactataactaatatccagccttccattatttcttttaaaagattttaaaaggcctaatgaggctgggcgaggtggctcacacctgtaatgccagcactttgggaggccgaggcaggcagatcacttgagaccaggagttcgagaccagtctggacaacatgatgaaaccctgtctctactaaaaatacaaaaattaaccagccatgttggcatacgcctgtaatcccatctacttgggaggctgaggcatgagaattgcttgaaccaggaaggtggaggctgcagtgagctgagattacaccactccactccagcctgggtgacagagtgagaccccgtctcaaaaaataaataaatacataaataagaggcctaatgataataatggctaatagttaagcacttaaaatgtgtcaggtactgttctaaattctgtacatttgataatccataaaatctccataacagcactatgaggaagatactgttactttaaattttgcatcagagcacagagaataggaaacctgttgaagattccatgcctgttaaatggtagagccaggtttcaatcaggtcacctaactgcacagctccctctcaaaaccactctactttctgcctcaaatttcaagaccgagatttccagatgcctttcagtaagccaggctaaccgccctctctggtttccctttcttgctccaactgcctcccctcgatgtgagtgcaaaacaaaaatattttaatgtgcatggtctttttttctttaaaaaatggaggttataaaagtaactagaaatagagattcactgtaacagagcatagtctcagatcccttgccctctgccttagcttcaaaaaaagtatctgtttcccctgctaccaccatgggataagctgtaaaatattcctgatctgtggtaagttccgcctcatttatatgctatccagaaaaacagtcaaggttgtggaatagcaatcagaactgaagtgaaacagtattggaaccccaatatgtggcatgtatttgtacttaagattcttcggttttctgtactttaaaataaaagcagaccataaatgaggtgaacatgaaatggaatctatagtgaagtggcccaagcaggccaactaccttttaaggaggccctcaaagatagcatttatagaagccctaactcatagatcccatcagaacatttaagagacctcttccttcattggactctggttattaaatgatgatcttttgaggtaattctgaacgtgtcgttttgttacagtctttgattggggtatatatagcatgttttttgttcattctggcttttataggtagacgggaaagtcagtgtgaatggagagacggttcatagagaggaggagaaggaaagagagtgtcccacggtggcacctgcccactccttaaccaaatcccagatgtttgaaggtgtggccagagtgcacgggtctccactggagctgaaacaagacaacggtagcatcgagatcaacataaagaagccaaactctgttccccaagagctcgcagtaagaaccaaacatttccccgcctccctttgggataattccatggtgaaagaatctgtttttaaaaataagtaggtcatgataatgaccatttctttctatgttggcgtattagtttgctagggctgctgtaagtaccacaaactcagtggcttaaacaacagaaactgtctcacagtcctggtagctagaagtccaaaaccaaggtgttggcagggttggctccctccattggtcatgagagagcatctgttccaggtctctctcctagcctctggtggctgctggcaatcttgatgttcctgggcttatggatgtgtcatccccctctctgcctttgtcttcactggtgttctccctgtggatgtgtctgtattcagatttccctattttattttattttattttatttttcgagatggaaattcgctctttttgcctaggctggagtgtaatggtgcgatcttggctcactgcaacctctgcctccaggcttcaagcaattctcctgcctcatcctcccaagtaactgggactacaggcatgcacaagtgcacccagctaattttgtatttttagtagagacaggtttcaccatgttggccaggctggtcttgagctcctgacctcaagtgatccacccacctcagcctcccaaaagtgctgggattacaggcatgagctaccacacccagcctaatttcccctttttagaagaacaccagtcatactgagtaggtccacccttctcccttgtgacctcatcttaactaatcacatctgcagcagccctatttccaaaggtcactttctgagtagtaagggttaggacttcaataatatgaattttgggagacacaattcaacctgtatcattggtataatggaaggtattacaatttatgagccagaaattactttttcttgtctcactattggtgtccagtgttatagaagaataagtaaatctttaaaataccttttccccccctgtttatttaggacctcattagacttgttaatgccatttgaaaataactggtgctatcagaatctagctttccatccccggcgatgtatatataaaagggcctttttcttattagttaaagaaacaaaaattcatttaaaagctgaaagtaatgtaaagcatcagagtactattgaatggcaaagctaaaaaatgtatgctaattcaggtactgcagaaaagtgaactcaaaataacatgatatttgtttctttggagtagaagacatcattgggaaaattgcactttcttccatctctcaccagaaagactcatgctggtttcactaatctaaccgaaactgtcactacacagatgcagccctgctttcggggtacgggctggactctgttcaacctcatttgtactcaccagaggctgagtttctgctgttctaatttatagcatttgggtttatattatagttacaagaagggaaaaactatcaagatattttcccccaggacctagaaaggtttggtgtgaaaggaaacttcttccggcaccaagggagctgagcgttgtgtgacccagctagctaaaacccacctagaaggctggatatcattatttttttcctttatgattagtcttttgaagactaaaattattttttttttcagaggagttgagaagatataattcttccacgcagtacccaagtgctctgtgaaagagattcaaatgggagtagaccaaaatcattttctcaccatggtaacacgtttcctagtctctaggagcagagttttgtgatccaggccactgcggagtctctcctgaacttggacttcctggacttccattttacttgtcatttgcatacgtcttacctctgctagagatttcttgcagatgatcacgagacagaatattgagttctgctagcagtgtgagaacttaactgatagagtaaacattaacttatgctgttaaaattaaactagaagaccccaaattaattagacataggggtggcattgcttttcagggacaattaataattctgttcttatttctcttttgccatttttcatgatgatcgttttctaaattcccttcattaaaaagatttcacattgattacatatcccccaaagtaacttgttttaagagaagcaaaattacacgatctgaaagaaactatgctatttcaaaagtttatacatgatcacatggagaaggatggccttcaggactttcttcctagaaaccagcctgatcctggttgcctaaggatgcaggtctaaactcagaaaagcctgggagtcttttccttttgtgtatttcttccttggagaaattgcctagttcagagtaatttctaggtcagtgaaccctaatgtttctgaacaggtagtagtatttatggaccctgtctatagtactttaggcttttgaatcaactatggcagggggtattgcattactttctgtgtgggaaaatctctgtatatatctgtcagactataagctaagttgttagctgtactacataggactgtggctcattactcaaatactcatcatactcacatgcaacttaggataccacaagttttccattcagagtgtgttatcccaagagtcattttaaaagaatcacttctccagtaaacctactccccattttacttctttgtgcatgattccaagcaaagcatttcttgactgtgttacagccggtatactcctgttaaaaaaaaaaaaaaaggaattaattggtcatggcaaaatatggtgaccagcttagaacaggaggctgcacttcagggcctcccagagactgacaccagcttggacttcattttctgtttctaattcacttgcctgattctgtggggctgtcaaaagattagtgttcttctttttaaatagtgtctttcttccaaaaactgcattcccaacagatacactctctacagaggagtagcttcacccaccactaaaatgtcacaattcctttagggtgagctagaactgttcaaagggcacagcagcagcagtaggcaggagcatgaattcaggaatggagggagaacaacagagaagggcggcccgagacctgctgggggaagggattgcgtgtggagcgtcagcatctgggcccgggacgggcactatggatgacatcatatcatctctttggtttccttctacctcatctttctcatttgaaactcttgggactgtcactctcttactttagaactaggtcctaaattaagttaggaattttaaaaaatgctttgtctgtacctcctcatgccagataattcccagtcatcttcagttgaatcacctttatggtaataagattgtgatagcagttaccttgcagatgggcacgtgttaattggtaaatatgaattaaggacctaccctattacctgttttttgaaatagaagaataaacttctaaacttggtaggaaaaaaatgttcataaagccactagaaaagtatatagaacaacgtagaattaaatacagagggactcatgacttaggatggttcaccttaccatttttcaatcctatgattgtgcaaaggcaatatatgttaaatagcaactgtgcttcgaattttgaattttgatcttttcctgggctagtaatatgcagtaggacactctcatgatgctgggcatggttgtgagtgagccgcagctcccagtcagccacgagatcacgagggtaaacaaccgatactctatagtgcactgaatctccagatgattttgcccaaccgcgaatgtaagcgttctgagcatgtttaaggtaggttaggctaaactatgatgtttggtaagttgggtgtattcagtacatctttgacttaacgatgttttcaatttacaatgggtttatcagaatgtaaccttgtaagtcatggaacgtctgtactagatggtggagtaagaaaaccagaggaatatacgattgcaaagaacaggcaagatcttcataggctgagtttagtctgggaaggttttgtgtgggatgtggattttgaaacttgacagtaagtgtgggatttgtgttgaagtggaggaggggctattctacacaccagaaagggcagaatcaaaggcatggacaatggtgaggagcccaccagaggaccccaagaaggataagaggtgatgagggtgctgtatattctaggcagagggatcaggtcctcctgtggccacccaatccctttgcccccaattatccctgagatatttcaggggttttgttcatttcagcatctctgttaaaggcccagtggaaacctcacacttttttttcatttaaaaatactggcttctgtaagaaaatcatgttatagcacacaagcagactcctagaatataggactgtaaaagaatttagaaggtcttctaatctgagggctaatatatcctatgtttagtggcctacagaaagatatttttatgtatgtctcccccaaagctattccagtgttgtcttgattcactgtcagttatatttgtatctgaagctcttctttcctcaatggcaccaaaatgacccttttcgaaaataaccaaaaaatacttcatacactatatcaaaggtcagactccacctgaacgtcaaactgtctaagcctcaatttatatttaaaaagaagtataataatagcatagacatcagatggttattgtgagaattcatgtctgtagagcacttagcatactgtcagggtgactcagagaccacaggtgccactcagctatctttaatattgtcatgcaacaagtgggagtaaggaagttataatatttaatacatttttcagaggcccaaaaaggcaatcagtatgaagttttttggattaaagtaagttggtcaaaattagcatcttgaacagacgtgaatttcatacaaatgagatgaattgcttttaatcttctaactcaacttgttgttccaattgtaattctctaaaaaacatacagatgtggacagctttttctagaagacagttgtccttgcagacacttacatgattcttcctgcagctcttttttttttcgtctttccccccaccttttgtagagaatggggtctcactatatcacccaagcaggtctctagcaattctccggggctcaagggatactctcacctcttcctccctaagtgctgggattataggcatgagccaccatgcctggcccttcctgcagctctttttgcctctccttttgttccctcctttccagttctggccccctcctgccacctaaactcctaagactcccacccatcgacccctgtgtcactcctttccatgcctgttcatcagatctctctcaccagctcatctcaagtgacgtagcccatgctctgcctcccagtcagcaccatcccatcaggttcgtggcaattttccctcattgagcaagggccaaactcacctattgggtatctaaactacttcatctgcttttctcaaactgagtcacaaggtaggtctgtttttcccattttgaaaaagctctaggtcttcctcttgaaaattcagtacttatgttttctgatccaggaaaacagacaatcggatctttcttgaaacattgcattttgcagtgagagcagggtgaaggcatttgagtaggtgccgtttttcttataactgagaccaactgcaaattccttttagatggcaaatgtcaataaacatttcttgagaaactggttttctccatctagaagtagttgtaagattgctagatttaatgatttttaaaagtcattaaagatatttagataaagataaagatgcatttacagatttcgagaaagcatacatcagggaaaataaaaaattaacctggcctatctatccagttacctgggtcaaaacctcatttttttttaatttgaaaagtttagtacaaaaaaaagtttaagacatggagagcctgattctccatatagattccctgtcttccagtggcagtagatatttggaggtataaaagtgaaaagagaaacccatgcacagcatatgtggcacctgggtctggcaccgcagtgccagagcataaatagactgattttccaggcttgtgtccagataagttgtccaagacgagagccaggaaatcgctcagagtcacagaaccgttgctcgggaaaggacgttggacatcacttgttccaacccatagaggttaaatgatcagtccgagctcaccagcaactccatgtgagaaacaggcccagcacccagaccctcagtctcaggagggtgcttgccctcctgcttcacatgtctagtacatcttccaatgtcgttctctgggccagtccaccaccaagattctagttaaaatgagcagccagatgccaggtaggctttgggctagaccatgtctctctcaagccaggaaactgccacctcccacctgaggccccagggctgagtctggcacccgggcagtttggatcgcattctcagttaaggggaagccagctcctggctgagtcccatgcaacctttctgtgctctcattcattcacgtccagggatctgtttttatttacttgttttcattcttgagaaagtgttaccagttggagaagggaagggctctcctctgttgagctgtaaccaaagaaaaatacaggtcagaaaacacatttttccatcaaggcgggtttgtttgaagcaaaccgctgagtgtatccctgccaactttgaactcatttccttcgaagtaatgatgtgagtacaaaagtaataagcctccaggatggagtatccagacataagttaattaacctggctttggggatttcccttgattacagatagcctatatacattgcagaatacagaaaactggagaaaacatcgactacctattactcagccactctgaaattaatgctaacatttttagaaaatgtatatccttctttttctcagtgtgtataaagtatttttaagtgggttcctgttattcaaattgcttgctttttctcttactttatctgaatattttgctagcagtagccagattttgatgactagcatacatttaaactaagcctgagagtatacattccataaataagtgcataatatttatttacttaacaaggattacgcatgtatctggccgctaattcctcagaacgtggactgaacagaaatccccgagatgagctgatggctgggggcagttgggtccccaggagccctaggaaggggagagattccaggagagttctaatcttttgcagaataaatgagtgggaggtagaggaaagaaagggaatggaaaaagcagtttgaatcacttcagcaataaacaagactcttaggtgatagattgcctctcatgtatcaaaacctctcaatactggaggacagcttggaattggtgtgactccaagcccaggtggtgggacattgaggtcaccagcacaggcagggttcccacctcccctgccttctagcagtatgaccctcggtaagtcgcttaacctcccgggcctcagtttcttcacttgtatgaagggaatcatgttggtacctacctcctaagcttgctctgagaattatgtgagacgattcttatgaaaggcccaacagcactgacacgtggcaagtgcagtaaatattgattgcagtttctgctgttgctactatcaagttaccgtatcaaatgtcaggatgtaacctttaaagcaccttttaaggtaagttatctggagtttagtatttgagtgctgagccatagagaaatgtcttgagaaatgtgagaattcttgaaagcagaagttctccagcatacataagtggtaaaacgttgctggaatgtggtatgctggtacaataagccttagtgaagtagttagtgcttgagcaccccatcccctttgcatcacacattaggtctttaggtctaaagggcttcatgaactatcttatttcattgattctaagtggcacacttttcacattttaacatctctaaatcaggatctgtcttataatcaaaagtgcatcatatttaacagatggcgtgttttctttcttagtagtacctaaagtaatacaacttaaaattgatggcattttagatttaataaaatatgttcatttctttgttcatttttggtctggtgaggctttggccctgttgtgtagttatttattttgtttatagtatttgtaaacaccagtgttctcaagaggctcattcatcaatatttaactgcaaatttgtttcccagtctcagttttctataatgtaatccatttgtggggaaggggaagctaaaaatcagtatttctgccagtattttctatatagatgtcataaaacaaaaataccatcatgtattaatatttctacatgtgcaagacagcactttgaattataaaacccaacttattcttttgcaatgctaaactggttgatcttcaaatcctactaccatgttggaggttcatatagcaaacaatgtaaacacacacatgtaccataacctaaatataacaaaacagaccagttaactattctcactcatttaagtctcttgcagggattcaagtcagacttattgatatattaaaatattacaaaatccaaggtgatgcatatttcctgcctagggttttaaaagtgtgttttaacttaatattatgttcttccagaattgatacatgactatctgtcattagaaaatgcccatctaattatgaggatttcaaaactactccatcctccaaagaaaaatcacatttttgccactagatgctattgtaaaaccttttagaaacttgaaagttttgttgtttaaaatttctttgtttttaaagaattcagtgatggtttccaccaatgcattaactttaaatacctttcattttgagaggcaaaatttgatttatggataaaatatatatacttatgagagacgaataaattcatagttctcgagaacccatggggatattttatgagttaataatgccttttctgaaaccaactttagcctttatcttaaaaccttttaaaatttatgcaatatttcatacacactttaaaatttaactttagctttttacaagaaacttctaccaaaaaatgcaatagtcattaacttgctctctttaattatcaaaatataatctagctagtatttaatttaacattttatttatttttactaagtaaatattgtaatagcaggataattttggacttcattctagagtcaattggctcccagtgaaagacaatgtaaaattacattgattttgttttccaattacagaagtaatacatagtcattatagaacattttggaatatataaaatgtatgtaaagagaaggaaaagtcacccaaaacttaagcacattaaaaataatcacaattaacatttttgtattttcttactatctttttttctatatgtttatgtataggcatgtatataatcatatacatgtaaacatcaaactatgtatacagtttacatttcctatcattagtaagtattttcacgtatcattaactattattcaacatcttattttttcatgattatattgcctttatggacatgcagtaattcattcaatcattccccaattattggatatttaagttgtttcaattttttttactattgtaaattccatcaagcataaaactgacacaattgaagtactactgagagagaggaacacaagcattagagtaattactggaggtgccatggagatgaacatgacagtgatgtaccaagtggattggacagtgaggttcaaatcacagagacttcttagtggagaacaaggaagaaaggcaaacctggagtcccagccatagaaacagaaaggaaatgattgatatgaaaactagtatgttagaaacttagaaggacttggcaaatgatgaatattcatgaggtatgagtcaaagatcacttgaaagtttatgtgatgggaagaactgctgccataaacagaaattgtcaaatttggaggagaaggccattgaccctagaggtgaaaccgaagctctgatggactctcacagctggagatgaaaatacgagttatacacggagaatgtaatggtgaatccatgggaataattgatatatttgagggtaattcagcacaagtggaggaaaacagggtccagttgaaatctttcagaatgacccatattttgatgaaaaggagtaagaaccagtgagaaaagagtagtctgaaagtggggaggagagggaaaaggagagaatgaattagaactccagtaatagagattcactgggagcccaggaaggatgagaactgcaggctaaaatccacaatggtaagggccacaggcaactatgccaagacaggccactgagaagttaattgtaacctttaaagaaccacaaaaagacttcactggtgttatgaccctaagccagcttgaaaggctttcaagaacaagtaggtgatagccatgattttgagcttttggtggtgaaagaaaagaaaatgtgggatgtgcgtccaaggcagtcataggaggtttggtgagatggtgaaccgcatgggtgtcctgttctccatagaatgtctccttccaaccaatccaggctctcgccatgaagctgcctgggaagtagaagagggaattcatatggccaaaccactttgttgacctaaaaattactgcttaaaaaataatttttagaacttttaaaggaatcatttattcaagggggaaaaaaatctctttttcaggcaaccactgagaaaacggaaccgaatagtcaagaggacaagaatgatggtggaaaatcaagaaaagggaatatagaacttgcctcatcaggtttgtttcataagagactagttttaaggcaaatcatggtaactgtttaagatgtaatggaaatagtcaagaatttttcctactgagccacaggaaagtagtaattagactccaggagtggtgcggttgtgctgccacctagaggcttcctggggaagttctgcccgtatggttaatgttgctgtgaaaataggagcccatgctctttcttaaagctacccagttttattttgttttttaaaatatttatccctataatcataaagaatattgtgttcttccatataaatcatgctaaaaattgagggtaggattttgacacacagtaacagcaatagataagcgagaggtcaaaaacataaaaatagacgctgaaatggtaaagctcacatatagttaaaaatgaataaaatagtgccatgaatctggacagtgagtataatatactgtattcgttgttttaggaagaagaccctgttcccgaaagtcttgttcctcaatatttttttgcagccttatcaatatgtttaacacttttcttcttttgataaacagtaaaacctctcaccctctttcaataccaaattattattttttataaggcctttctccagtgtttaccacttgagaaacataatttgtcaattaccaaattatttttaggtaacatttttaaataaattaaatatcacttaaaataatagcatttactttttcaaactagattgtgccttcacattttgatatgcccccttaggtagtgacttttccaccccttctaaagtgaacctaattcttctttatgtatcagagaacactttattttcattgcattatatacatataccccacaatccgtaacacattccaattaagaaattctgatgttaaaatggagcattgaaatacaaaaaaaggaagcatcaggttgctgctcattcactgggatagaaactacctgtagatgttctcttatctagcccagctgtcataattatatatttcgtgtcagcattctgttccatgtggtgttattcagatgtaaaccgtgacccttactaaaaacttaagttcttcatagtgtggttataggacgtgatttgtgttgcttgttgttcaataccatgaaagagctttgggaattccagcatcttaggctcttttatatctctgagcacactgtcattcagcttatattgccaggacgggatatggactgaatgtacttcatggcattgcagaataaatggtcctatagatatttgattttcttttccttctgtacgtttctggatgtaactccattgcagaaccacagcattttacaacaactgtgactcgatgcagcccgaccgtggcctttgtggaatttccctccagcccccagctgaagaatgatgtgtcggaagaaaaagaccagaagaaaccagaaaatgaaatgagtggaaaggtggagttggtgctgtcacaaaaggtgaagtgcagagtggaggaaagcggttaaacccacaagttaacatggccccatattacagctagctgctgctgtggcagttgtgaataatgaagatttatttctctcctcatcttttttcctatctttaatctgtagtttttctttttcgtgtgtgtgtgtgtgtgtgtgtgtgtgtgtgtgtgtgtgatggagttttgctcttgttgcccaggctggagtgcagcggtgtgatctctgctcaccacaacttctacctcctgggttcaagtgattctcctgccttaggctcccgagtagctgggattataggcgtctgccaccacgcccagctaatttttatatttttagtagagacggggtttcaccatgttggccaggctattctttgtggaaaagtgtaatataagttctaaagccttgcagttaggttttagtttgctgtgtgtgtttgcttatttgctttttaacctgtcagcttactggctagtctctctccaataatcatctatttgttagccatggtaattctgatgccactggatttggataacaagaaacctagaaaattattattctgatataataggttttaaagtcttgtttttattaaagtttcttccttgtttagagtctcatctcattcacattagtttgatttgttttcaggtacagagtctaaaaatattcatcagttacaccagttgttcgcaaccttgattactcttgggaatttaaaaaataacaagctagctgggtgtggtggctcacaactgtaatcccagcactttgggaggccagggcaggaggatcacttgagcccaggagttcaagactagcctgggcaacccagaaagtcttcatctctaaaaaaaaaaaaaaaaaaaaatagtaataataataatagttagccaggcatggtggtgagtgcctgtaattccagatactgtggaggcttaggtgggaggatcacttagcccaagaggtcaaggctgctgtgagctgtgattataccactgcactctaacctgggcgacacagctagaccccatctcaaaaacaaacaaacaaaacaatccaagcccattccagaccaaataaattagaatctgtggaggcagagcccaggcatctgtattttttaaagctcccaggtaattttaatgggccaccactacggacttgcacaactggaagactatccgtagtggtgtaccacctttcagaatggaccctcaatttgggtatgaccttaaagtgaaaaatctgccacttgtagttccagtttattcatcatttactcaaccagtattggctgtgcacctactatgtcatgcctggccctgtgctaggtactggatagtcaacagtgaacatgatgcactccctggccttaggagctgagaattctgtatccttggtagagcctctaaaatgcctgttgccttgatgcgttttcaatatttcagaccctagctattcttcatttttatagataattaatggtctgcaggtctggaaaggggaactaaactgggagtcaaacgttgggaggcaggcagaatttcccacctttgcaggtttcgttttatcagcatcacactagttactattatttattacccttccaaatttacttgcttttcccacttaaatctaaactgaaaggaaaaatctgtatcattgcaagtaaaacatataacttgaacagaatgaataccctaagtaaaaagcagtcattgcgaacctcatctgtggaacctcatcttggagttcatctgtggatcaccagagtcacacctgccctactatggaaaaaagtgttttcaggacttcttcagtttgttcgtgtgtgtgtttttgtgcattgtgccttttggtcatctggtaaacattattctcagaatattttttaagcgtaaaataaaatacacaggattaccaagttattcttggtatcatgtggtgccaaatatatatatagcccctgaatactgttttgttgactccaggataagaacccctgccagctgatgagcaaatggaatcatggtctttgaatcaaacacttttctcacttagactatgtgaatttctcccttttcttcctttcttactgtacggctagctcttagataaagggcgaatggtggccactgtgattgcaacagcttttatttcctgatttcacttgagagtgtttcctttataaagcaaagcacccatgcttacaggcttacctttttacatagcggtcattttgatcattgctgatgacccttaactgtttcatttacaaccaggcattactgaaacatgtttttgccagcctccactacaaggaaatgctatgaggttaatgactggtgggttgtcagctttgggaaggctagaccttatcatttgctgtgtagcaccaacgttcatttggacacctcgttgacctctgtaatgcagaatgaggtgattagttttctttaagattctcttagagttgaatatattattcataaaaattccttctgaggataaattctaacattaatttattctgaggaccaaattagggatcagcatatgatgaaacaagtgctctgtggtctcactcgccctgaggtcattgatctatagggaacacagccaccagccaaagagtgaatcagagaaggtcctgcgagcagctgaaaaaaacataaatttatacagccacgctcctcattcagacctatgcacagtgtcaaccaatgcttattttagacatttttgttttaataagtttggtaatctggtctttcagcaatcagctaatcagaagcaacaaaccagaagaagggtgtttctactaaaggtcattcatattagggagaaacaaaattaagtagcaataacaagaaaaatctgttttacaaagcaaacataagaatttttaaagtctgtaattttggaactatttacaagtagtaacaagtagtccaacatgcctcaaaaattccctaagggcatcagatactaaggcactgttcgacagtggttgtttataataatgtttctttgtcagcaggcaaagtatactgtctttaatgtgctttgcataaatttgtggggggttatgtaatgtctttagaataatatccattgaaaagtaatactactttaatgtttagcacttatggagtaagatttgttttaattatcttatgtggaacatctaaatctcctgacattacagattcagttttgtgtggtaccatgaagagaatttgtgattgttcaataagaaaataagagagtaatgtataattccaaagatgtaatattgtcttctggtttggagaaaagtggtcattacgtttttacgctcatgtttgatttatctaaaaaattgacgctctgttaatgtagagaaggatgaaagcgttttagggaagaaacaaaaaatgaaatgtttaaatttaaatgttaactgtttgaactgaatgacttctataacagccatggatccttaaattgtgtgtcacctgtgcatttatcaatggacagttcttgcaatatttatacctgttttccattgtccaggtggtaaagccaaaatctccagaacccgaagcaacgctgacatttccatttctggacaaaatgcctgaagccaaccaactacatttgccaaatctcaattctcaaggtaaagaggacatgttttattttaggtctgcatgttctgggcccatctgtagtaaactattacttaatttaaaggaagattacgtcctttatgttgctattcctttagccagggtgtttgccagagtctgtgatagctgaatttatgacttcagaatggaaagctggagccggattctctatttgagcagaccaggaaccctagctgccaaggccatttggtcagccaggcactataggcacaatagagcctatacaagtgttagagctttaaaattttgtattatcaaaattagctgggtgtggtggcatgcgcctttagtcccagctacttgggaggctgaggcaggagaatcgcttgaacccaggaggctgaggttgcagtgagctgagatcatgccactgcactcgagcctggtgacagagctgtgacaaaaaaaaaaaatttgtattatctccaaaatataaaaagataaaaagtcataaaatcataaattaatgtacttaatagaaagtttaatattatgtatatttcactgttaattctagtcttcataaatgtccatttaatttgacagtaattttgagaaaaagctttatttttttttactccacaataattcctgggtgcatgatgattattgagaaatcattcaccatcatagattaaacaggttataaacaaacattttaatctttatgtgtgtgtattacataaattacattctcatatatatatgagaaacgtgtgtgtgtgtgtaatacacatacataatactaaagatttaaaaatgtttaacacatacatactgaggatatattttaatatgtttgatgtattttaatgtgtttgatataatgtgggaaggggttgcctctagaaacgtgggcatttagggcctataagaaggtcttaaaatggcactgaccactgaaaattccccaagtactgtgtagaccatatatagggttgtgaattcacccctttactctttaagaacccaatttgaatccctttatcctagtgggaatcccaggtgcccatgaccaccagaaagggccctgagggatgtgaacagtggaggatgggttctgagaattccacaacccagagggactatgcttcaaaacaactagaccgctgagttttactgctgtgagatctctctctagatgtggaaatgggccagatgcagtggctcacacctgtaatcccaatactttgggaggccgaggcaggaggagcacttgaggccagcagttgagaccagcctgtgcaacatagcaagactttgtcgctaccaaaaaaaaaaaaaaattttaaatataaacattttttaaaaaaagaaacagccagagttcaggaggcaagaactgtagggtttcttgtttttcttttttaacagactttctccagtgtgttttgtagatttagcttatttttacttttctttttaagggtgggcagctatttgagccactggcagaatctgagttggcttccattagctattattgatgtttggcagataagttgggttttatctacataacagggaactcttggcaataattaactggtacatgtgctgatggatactaggttcttaatgtggaaacaagtttaatactgttttcaaagcatttgtcttaaatttgtccgtcctactgtcctgaagggaattaaaaataaagtgtcacaactgggccagcaaatggccatatttggaccaattttaattctgccctatttctagtactttgtaattgtgtagataagtggtatagagagggaataaatattttaagccattttaaagccatgttttgttttcttataaatttacacatttcattacttattgtgaggcattttgattttgtaaaatgtgctgctgaattgagaaactttacttcattctttacccaagtcgaatgactaaaaaataaaatttagtagagtactgaaacatttcaaaatgtattctttaagatagaattgtatttggaatacaccagttgtatacttgtattagtttgttttcatgctgttgataaagacatacctgagactgggtaatttataaaggaaagaggcttcattgactcatagttccacatggctgaagaggcctcacagtcatggtggaagatgaaggaagagcaacgggacatcttacatggtggccagcaaagagagagcttgtgtagggaaacttccctttataaaaccatcagatctcgtgagacttattcactatcacaagaatagcacaagaaagacccaccctcatgattcagttacctcccaccaggtccctcccatgacatgtgggaatcatgggagctttgattcaagatttgggaggggacatagccaaaccgtatgaatactttcatctggttcatggaaactgtaattatagctgcatgctctggagacaaaatgcctgggttcaaattttcatgtgtctagttcttagctgtgtgaccttacccatcagatttcccctaatctctaatcagcacctgtaaactagaaataataccagtaataacctcatagggattttagaaataccaaatgggagaatccataaaaagtgtttagctcaatacctggcccagaataagcattcataatgtattctagtaattgtagaatagcagcaggaggagtaaaagaataaagcaagatgtcaggcagaaataaactactctcgaatcctttctttaaaataagagtgttcatgttgtggagatcgggtttttcactgtggttctcaaaccctgtgtgccagggtccctgtagggcttggagcccactctcacagtgtctcattcagtaggtctaggctggggccagaggatttgcatttcttacaggttcccaggtgatgctcatgctgcacatctcaccacactctgaaaaccactggcctcaagtatttatttaaattgtgcaccaaaaatatcactgattgatatgaaaataacagtaataattgcttgacatttataaagtctccatctttcaagaagccagagacctctaataaatgtaaccttaaaatacatgatttgtcttcaattgggatggggaaatgggggaggcataggtctctgcccagcacccatttaagggactgatctgaagtcaagcatcaagtccaatgaaactctagggttaggatcaggtatcctggagccacacctaacactttctcccccagaaagtggtctctcccccatttctataaagtcatccattcatagactggtcatacaggtcactgaagatctgctgatcgaccctaatgatgttccacacgttttccttacacacacacacccaggcattcagtttttaaatgccctgaaaacagtcataaaatacatttgaaagtgacaaattcccttttcttagctgcctctcagcagcagaaagatatctcaaactgatgtttcagtaaaatatgtgcgcattaaaaactgatttttttattgaaaatgacgacaacagcagagtttaaggatacaaatccttgccatgagccaccacagaaaggcatatactcaacctttatttatacgtacaaaaaacttctgccacagacttctatacataacctttatgatgtgtaatgtatatgaaatagtaattaaaccacccatctttgctgccttttatacttttctagtgttctccaaaaagcaatacaaattatacatttttgttcttgcatagtatatcattctatcattttgagatttaacattttaacactatcaccattaagtatgaccctgtgaaatttcatctaacaccaaagaagacaatagcataaactgtcctggttctgttgattttgtacatgtcttcaggttttatatgtgtgttattaagacattttgtactgtagatttactgactctcaattctggtattgactagagccaaactccctatagtacttgggagcatggttctattcagttctcaccccagttttcatggttttctgtttgttctgttctgccatctgatctagagtcgcctggcactgccagtgttccgcttagagttcagaactcttggcgacgatcccagtttttctcccagtcaggtaaactgcatactgggtagctgtatttcttttgtgcgaaaatccatgttggggcgatcaatgatgtgtggcacttgtcttcatttctgatttctggggaaaaaattatttcttatgcacagttagcaaagagctagttcttttatattactaccagttatgctaaaattgggggtaggaggagaggaatcacacaactttatgttgatttcaagaattcaaagaaataataatattcatcattttcttgagagtcccctgcctttaaaaaaaaaaaaaaagattaaaagcatttaccagaaactgatcatagttctcttgttaactgtgtcactgtgtttgcttcctgggtgacatctggcctctgtttgtatggtacttctccatgccagacagtgaggggactgctcagtcaagccacaatgcaaggtgcactaagaatcagtactaataggaacagtttttgcttcctgtagtctagtacctggtgttaattgatgtgatcaatcatttgatagtagtttaaacttcttttggtgatgggtgcaacctgctacaggggttgtctgctttattatgattttctaatgttcttgacttaccaaacacacacacacacacacacacacacacacacacacacacacaaaattggtttaaagctgatgtaggaactatactccactgataggtcaaaaacaaagacaattagaaaatactcacattcatatcttttttttctttcttttttttctgtgcagtggattctccaagcagtgagaagtcacctgttatgacacctgtaagtcactcattttaaggaataagattatgagttagtgtgattttaatttataacatttgattggctcaaagagtattcaggccgggtgcaggcggtggctcacgcctgtaatcccaacactttgggagggtgaggcgggtggatcacgaggtcaggtgttcaagatcaggctgactaacatggtgaaacactgtctcttactaaaaatacaaaaattaggcaggtgtggtggcaccgagatcgtgtcactgcactccagtctgggtgacagagcgagacttcgtctcaaaaaaaaaaaaaaaaaaaaaaagagtattcaaccaaaattgagacccaaacaattgatttgtaaaagaataattaaaagtcatatataacgccattgggtaaattataaagacatggattatcattatatggaattgttactgtgcctggaaataagtgataagaaagcaaaatctaagaggcaattaaaatgaatgtgacagacttggcatggtggctcacacctgtaatcccagcactttgggagaccgaggtaggtggatcacttgaggtcaggagttcgagaccaacctagccaacatggtgaaaccccgtctctactgaaaacacaaaaattagctgggtgtgctggcgggcacctgtaatcccagctactcagggggctgaggcaggagaattgcttcaacccaagaggaagaggttgcagtgagccaagatcacactactgcactgcagcctgggtgacagagcgagactccatctcaaagaaaagaaaaaagaatagaatagaatagaagaattagtattaaaactgacaatttctatagatacatttttttaaatgtacctcattttttaatatgaggataatacttgaacatagtatattgttggcagataggacctggcctgaactctccaagagacccaaactctcatttttgcaccccttctcataatgagtatttgaccaataataactgtaatgttgctttctattttgtattttaatgaaataagaaaacatttgttaattaaaataagacacaaggtgctgtggacattccttgctgctgcatggcatctgaactggtatttctaatctcaggccttgttcgccctctggaattcccattagatttggagactttctctgtggcacaaccaactgtggcattgcccatgagcaaccctggctcagccacataatcactactgtgcctttgattctggatttagctgtgtagccctgaaggtgttatataacttctctgaccctcatcttccttgaccgtacagtaagatgacagtacttttcttttgaagttgtcatgtgccttaattgaaataattattcagaagcccctagcacagtggctgatatgtaaataaatcctccccctctcccaatagctaatccaagaggcccaccatagtcaatatcaattcttatctgtaggtaaattgtctcacttagggagttctaagtgcctctgcagaacagagaagggatccatcacttgttgcataacccttgatgtccccagccacagtacaaaactagggactatctgtggaggctcagtcccaagccaatactgggaatcctgagtttcctgggaagctgagttcattgatgatggatgggaaccccagaacgatcccaaagctggcatccatggcacagatctgaagatttccattttaaattgcatttggaacaaagatgtcagttgttcatgccccctgggtaggggtggagaggaagggcattccaaagaaacacattcgcatttcttgtttaaggaaaatagaataagaaagagacaaatcactggcctacttaagtaaatgctctgaaaatttcatgtgcttttgatagtaaatgtctcatcatagaacagaaaataaaagaaacttgaaataagtagcgcttcaagaggagataagcattagattatgctggcctccgtagactctggctatttttggtcagtcttggagtaccagaggccctcgggactatgaaagaaagggactctgatggtaggagatgcattacccagcatgaagggattccattcatttattcaacaaacatttgttgagggcctaaaaatataaggtcttggggtagataggaggatgaggggctcttcctgcctcctgaagaatccctaggccagaggaagatatggacttgtaaacaggtaaattgtaggacaaagtgggttaaatgctgtccattctgacttcctctagcaccttttacatctcttatgatagttatcacactgtcttctggtcatatgcatatattggtcacttttccactccacacacactcaggtgtaagctccatgaggctgggccacttggctagctggtaaccccgccctggcccacagtcagtgggccataatctgcaaattatctgcaaaagaaggagcaagatcattgtttcattctctcttgtttatcatgctggtttcttcccctttatcctcctcttaaaatacccactgctttcctctgttgccttttaacacatattctgtattttctgtgctcaatccccccaccccacacttcctcctcctatctgcccactccttacttgacttattcctgagagcaccgcctagtgaaatttagaaattaaataattcctaattgtttctcttattttcctactattggagtttcctcagtgttttttgtatggctttattcacataaacatccccttttccctcaaaagacaaagaggggccatgcccctggaagagcttctgaatgtttaaaccacctcgaagttctggaacaatgacaggtggagccaacttccaacaccattaaattccgatagaatttcccatctggtataaccacatttggataacatttatggtcatccaagggagtttgggaaattttagattacagatgctcttcaacttaagaatggggtcacagcccaataaagacattgtaagttgaaaatactttaagtcaaaactgcatttgatatgcccaacctactgaatgaacattatagctcagcctagcctaccttaaacgtgctcaaaacattatgttagcctgcaattgggcaaaatcatctcacacaaagcctattttatgataaagtgttgaatatctcatgaaatttattgaataccatcctaaaagtgaaaaatagaatggctgtttgggtatttgaagtacagtttctaccaactccatattgcttttgtaccattataaacttgagaaaatgttaagttaacccacctaagctggggaccatctgtatgcacaattaaatgattttccccctgcataacttccaagagcctgtaatatgctaatgtgcagtgtgaaactcaggagtggcaagcaggaagcaataagctagtatccctagattattggcccacttgggtttgactattctgtgagcatcatggccatcccaatcaattgcaggaagcacagcagcaagagtacaaaatgaggcccaagtttcatttgtccaaatatattaaagttctaaatattgatgaagttataaatcaagcattgcccacagcctggcctgcattctctgcctgaagatacttccctgggccagcccacccgccatgcacctgaatggtaatgtggatctgttgggggccaggcagagtgggaggtgggctggcccaggtaccctgggcactaactggatgtatcaaaaccttggataggactgaccctgttcatcttcccaggctaccagggtacatagattttgcctgcacccctccccaccccaaccctgtttcccatcccccgtcaacttccccacccgtgccttgctttttcaacttaagattcccaggcagttgcttccctgtcctaccccatcagaacaaagggaagggaggagcacagttattgtgccctggtctgcctgggcacctactctgggtgactggggcagccgactttaaacacagcagcccctcttttcctggtttcctgggggcaggctgtgatttcccttccccccaccccccacctgtaccctcccagtctcatattctgtggcctgggcacctgcttcggttcatggatttttctctgttattcctcattatttacttggttcccaaacttgcaaaaaccttttattaatacaaaaaggaagtaagtctttgagcttgagtgtttgtgtcatgcgggccccagggcaagtgatctgcttgcctggatcttaggtggtactggtgagcattggtgagttaaacaacccactgtagggaaaagtggtatggaaaagcaacagtagtataaaagattagtttttatagcgtggcaaacaacacttcttacaaaatgcatttctgctaaaataactggtctcgtttgcttggacccaggatcaatatgcagaatgagcaccttaggttcagaagcatgaatgcatttaagagaaatcacttctaagagaaatgaagcaaagccttccaatgccagtggctaattactttgtgttttcattagctccaaaaagattcacagaatcataccagcgtcttggaagtaaaccaaagagggactaagattaaaaaatggtttctgccaccaaagaggatgtttagatatatgaagccttctgctcctgtgtgtcaatctgggtgccaggccagaggccaattgtctactcttcacccggcctgtcccttgaggacatggctcaattctgatcatggtttcatttttctaagcagtttaagttctgggcatgggacccagaagaggagcgcaggcgacaggaaaaatggcaacaggaacaggaacgtttgctccaggtaggatggagtttgctgctttttttgtttttccttttttgtcctcttgctttccattgcattaaatagacttttagcacaggaaatgaatggaatcaagttattctcggaagttagtgagtctcaagtcagttcattttgtgtccttgtaacagggtaccctgtgtctcattcttcctgccaaagactgcaataataaacatgatgaaaaaccattcatattaacactgaaccaaaaaaccctccaagtatggataagggccagtctacccattcatcacctccttagttgccagtcaatttccagtcaagtagcagtgggaatgaattatctaaaagctctctgctagcatacacgtgaaataaaatttagcctcagtctactttcttaaatagaaacttttgctctacctttgagggctgggcgtggtggctcacgactgtaatcccagcactttgggaggccgatgtgagtgcatcatctgaggtcaggagttggagaccagcctggccaacatgacgaaaccccgtctctaccaaaaatacaaaaattagctgggcatggtgatgcacacctgtaattcctgctactcgggaggttgagacagaagaatcgcttgaactcagaaggcagaggttgcagtgagctgagatcatgccactgtactccaacctagacaacagagtgagaatgtctaaaaaaaaaaaaagccgatgtgagtggatcacctgaggtcaggagttggagactagcctgagaccaacatggagaaaccccatctctactaaaaatacaaaattagccgggcgtggtgtcacatgcctgtaatcccagctagggaggctgagacaggagaattgtttgaacccgtgaggcggaggttgcagtgagccgagatcacgccattgcactccagcctggacgacaaaaacaaaactccatctcaaaaaaaagaaaaaagaaaagaaaaagaaatgtttgctctacctttgggtaaaagctactgattatcaattctagaaaaattctgatagtaagttcatcatactcccacttcatgccagttttatggattaacagggcttcaaaaggtaacctagcaacctaaagaactaacccatgttgggtacctgggatgtgccaggaactgaggttagtgcttgacatttttacttcatttatcctcaaacagcacttcagagtatgtcttattagcccttgtttgcaattgaagaaagtaaagttcactgaaattaagttaattgcccaaggttacacaactaataggtgtcaagaccagattcaaatccaagtctggatgactttaaaactcatgctccttctactacattcccactagtactgattttacaaaaataaataaataaataaataaaggaaaataatgttaaatctcattaattttgatgactttctgctgcttgtagaaagcaatgctttttttgacgtttgttcattttttaaattatacttcaagttctgggatacatgtgcagaacgggcaggtttgttacataggtatacacgtgtcatggtggtttgctgcacccaccaacccgtcacctacattaggtatttctcctaatgctatccctccgctagccccccaacccctgacaggccccagtgtgtggtattcccctccctgtgtccatgtgttctcattgttcatctcccacttatgagtgagaacatgcagtgcgtagaaagcaatgcttaatgcaagtttattttacttactttttcttttctttttttttttcctaatccttttggcttatttcccagggatgaggtggtagacagtgatttagatagcagtagtaggtggtagtgtggttttggctctgcctgttaagtttggcattttgtaacttgcagaaggttaagccttcaataccaaactgttagtaggaacccgattcatcaaaatctgggggctactgggatttgaggtccattgtgagacgtgcacccctgaccatctgctcgtctctgggagagttaggtgctcattccccagctaaatggtgaacagccaagagtcagatttccacaaagtgaagtcaggcaaatgtgctcctcactgtggtgctctattacatgccaaggggtgaccctggtaacagaggcgggcaccaggcctttgtattgctcctgtgtttctaacttgttgcctggtatggcatcgtgagttatgggccaaggtgtttgtaggggagggtgtgagagagagagagagatcgtgtgtgtgtgtgtgtgagtgaaatactgcatctttcactctctgcatctctgcatcatcagttcatcctgttggtgaggggaacacgtgatgtaagttcctagaaccaagaagcctaagaagctttacttgttttcagcttttatgtagttttaaggtctccttcctgtgcccctgaagtccctctctaaaactttacaatacttggttttcgtaacaatttttaccaggaaataaagagcatgccatgagttgatcaacaatgattttgttagagttaataagaacaccaggctccagagaatgccaagaaagtcctcctgctcctaagataccaatgaaacaggtgatgcctggaggaaatctcagtggcttccccatgaagacagaagcagacttgtttcagcctcgaagagaggattgacaatagtcagcctaaaatatctgagtgcgtgaaccacacataaatggttcctttgtctctgtcatgtcaggatgccattcccaaggcatcaggagtgtcacttctcattttatgcattaattttaatccccatttattcatttcttctaatcagccatcagggactccaatcacattttaaacaccacttttattcttagtgtgttcttttttccccccagaaatggtgacttctgctgcattatttctgaaaacaaaaatggcagttctgaagaagtactctaatggactgtttaaaaactactcttaattcagaagttacttaaagctaggaagactctattttggtagaatagtcacaagcaaagagtaattcagctattcagctaattatcatcttgtccacggtggacctttctgtattgtgtgtctaataaaccttcagggtttttcatcttttattacactctcctcgcagcaatgcatttctattagtggaatggcaaaactcatctccaaagggcccaataaaaccaaactattggtttagcacacctggaacaaaactggagtgaaggaagattttagaggctttccacctttccgtcttttctctttctgtaagcaaaacatgagcagcagaaaatactgctgtccattggattatgttcccaaaatgtttgagtgccacaaaaccatattccctttttattgcatgaatcaattaaattcagaatcctaacaagaagaagataatcttgcaacatattgtacatggtggtttaggggggaaaattcccgatgacgtatgcaatggtcagttgagaacaatctatggaaattccataacaggagagataccagaaggagcaggacaagctgaaagaagagtgggaaaaggcccaaaaggaggtggaagaggaagaacgcagatactatgaggaggtaggaaattcccaagaaggaatttgaccttgtcatcccaattcctcaaagtctagcaacactctctgtgtctgtggcatgcggatgcatgtggctgtgtctgactctttactgacagcagaatcccatcaagctctttaaaacagtcatgtcatttaggttctaaaagaccacaattcctcacaaatacagttcgtgataagggtgtgttgagtcacagtcaagggagacgatacaattacatctgttctctaatcagtgagtcagattcttgattgattttagagaggtgacatgaaataatcagttccattcatttgtgtgtttgttgtttggtaatagtgaattaattttatgaggataattttgatattgaggctgaatgactgcatttactatatagcactaaagagacttggaggagaagagaattttgtttaggttcattttgttttttaaatgaataagccagaacacattagataacttaaagggggctgcattttatgtatgttatctaaagtttgttcatgattaatattgtgaattttatattcagcaatactttttgtgcataatcagatccctaatagcatttctaattaggcttcttgtattactctaactaattaatttgcagagtctttgtttttcaaaattaaatgttaatttctaaattattacccatggagagtgttatatgatttgcatgcttttggaaaataagactttttaaaatgccctgcttgttcgaacatattctgatttttttctaaagtgccttaatgacatttttgtcttgacaaatatgatttttattttcccccctttcatcgattcctgtccttccccttaggagcgtaagataattgaagacactgtggttccatttactgtttcttcaagttccgctgaccagctgtctacctcttcctccatgactgaaggcagtgggacaatggtgagaccacagattaaaagcaatttgtgaaataaataaacctaaatggaagtaccaaaccccaagaccaaggttaccgaacagactcactagtttaaatccaagactagctattcccctagaatcacgtcagctactgtgtggccattgtaccccattgttctatcactgctgcagccaaattctagagtcatttcctggggagtggtaaagtcattaccccagcaagatctatcccagtagtctggaagccaaagtctctccacacctggctggcaagatctcaattagtgaagtcatattgtggaatatccttctcacagcccagttgccagatcattcattcattcaatatatatttattcccctctgccatactatacattcttttccattgtttggcagtagcaaagatgtcaataacatgttctccaccagcatccatgaaaattgcttctaacccccccacattccacaagacctgtagtcccagctgcctgggaggctgaggcaaaggatcccttaagccaaggaggtaaaggctgcagtgaacgtgatcttgccattgcaccactgtactccagcccgggtgagagaacaagaccctatctctaaaggaaataataataataaaaaaaactaatgcatgctgggcttaacactcaggtgatgggtgcagcaaaccaccatggcacatgtttatctgtgtaacaaacctgcacatcctgcatatgtaccccaaaacttcaagacaacaaataaaaaaacctaaataaataaataaaatgaacttacgtagaacagcactaaaaacaaacaaaaatccacaagaaatttacatgttgtctttgaaggccagagagagcctataaagtctggtctgcctccacattccccaaataaggtcatagaagatggaagtacagggcagaagttatatcaagacctgggtggtccataatccacgtaaaggaaaataacctgtggataccagaaaaccatttgtcctgaaatgagcggtcctatgactgttttattttgaaagaggggttttctaatcaattcccttttgtgataactttctaaagagattcagattatacatttattccaaatagttggaaatcagttgctattcagttaatttggacaactgttctttaaattataggtaacatgattgaaaaatacttcaaatatccctggccagagataagggttatacagtgtttttaaaatttatacttaagattttcattgtttttctccttagaataagatagacctgggaaactgtcaagatgaaaaacaagacagaagatggaagaaatcattccagggagatgacagtgacttattgctgaagactagggaaagtgatcgactggaggagaagggcaggtatgagcccatcccaagccaccatgaaaatgtacaaagctgggctctgctcgtgcacgctcaggaagggtactcattgctgatgcaaattacattcagcttcgaaatgaatgttccagtaatacattacatattgtttggacatattttgtaataggtctaaaatcagtgcccttatcttttgaatataaatagccttattttttttcttcttcttcttttttttttttttgcttgagacggagtctcactctatctcaggctggagtgccatggtacgatcttggctcactgcaactgctacctcccaggttcaagcgagtctcctccctcagcctcccaagtagctgggactacaggtgcgtgccaccacgcccagctaatttttgtatttttagtagagatggggtttcgtcatgttggtcaggctggtctcgaactcctgacctcaggtgatccacctgcctctacctcctgaagtactgggattacaggtgtgagccaccatgcctggcctaaatagccttatttttaaataggcaaactcttttttaaacaaaggggggcagtatcagtcttcaaaagctgattcaaagccccaaacctaaatattactcacttgaaatgatgaatgtgtctggagtgatagaaattgaaatgagaacctggggtcccaccactgtggtttcactgtggacctgaagttggccattattatcccctgagctgtaagaaatcatgtttgctctggtgataatataaagcataaccaactaattaactggttatgggtagtctccccacccatgctctactgtgttccatggaagatcagaaaaggacagctagagaccccctggagcgctcaaaactagctcatactggagcagactctggttgtggctgagggttgtaatgggtttattcatgccaccccaccccatcccttacctagaagggacccacagaaagcccaagaagctggcagtgctctgccaccaacatgttcttcatgagaaagatgttttcctctggggctctgagttaccagataggtattggcaagagtgcatgcatgtgcacacacacagcataccagagggatctgaggcatgaaaggctaagtgtcattttcaaagactggccaacttgaaaggttggctgggagcagagctttcctggtgggattttgctctgagaattctcctatgctcatcagctagaagactggttaaattgtaagctacaggtgctcagggctatgtccagaaactgtagagcccttggatgactttccagtttaaactctttaaagggacttttcagttttatgcaatgaaaaccactagtcaggaagatctgaatgatgctgataagctatttacaaaatgtacaaaaaatgtaactttacagaaaacctttgaccttcatttttgcaattttttgcatttttgcaatttctccagacaggcattttacatgaattttagctagttctccaggcggtccctgttttcaccagaaaaactttccttttatctcctccatctgttcattctttgcacacagaagccactgaaaggccagtgagttaccatggtcttcaaaggttccatgtggctaaattatttttacagtaagtgctctcttgtgaacatcaggttagctctggcattccttgaaattattagaatgaagacctttgtggacagagaaggcatcagaaatgatagtttgttgagcttgttaaatgggtggataatagaaatttgtagtactttatcattttaaatctattttaaaatagaataaataaagagtcccatctctttttttatattgtaattggtactcccatcctttaagttataggaccaagaagttcgattcagttacttttctctctgctctgaagtatacctctttattttaacagcctaactgaaggggccttggctcattctgggaaccctgtatcaaaaggagtccatgaagaccatcagctggataccgaggctggggccccacactgtggaacaaacccacagcttgctcagggtaagaatggagaagaccagtttcattcaatgtttaaattgttgtaagacccccacattgtccagaaagctatgatctctgctggctgcaggcttctctctaagggccctggacttctagcttatgcccaatatatagtgaataaacttctaccatcgtgtgctcagactctataggaacttgctggggactcagtgagacctgagagcgtgttcgcacttaaaaaaaaaatgtaactttacagaaaacctttgaccttcataagtagtgcattctgagacttcctcaaattcccaattccaccattggacataatctccccataaaatgcttatggaggagtggaatccccaaagccgggtgagatgtgggtgctggaatgttgggaaggtcccatcggttcccattgccatttcaccctcattcccacctgtgtctcccacgctcctggctcaccatagcaaaattcaaatgtattcctcgcaaaaatgatcaaattctacatgccgagggtcttcaggatcattcctagataactgaaacttcaaatgttgaatgatataaagaggaggagtgagctaagaggatgaaagaatgaccctggtaaatgttttattgccaaagcaaatctggctgaccaaataaatattttttaatggtggaattaacgaattttgccttaaattttttagcttgttgtctatacacatatttacctgggtttgattataatacataagcatagatttgtgcgtgttcccaaatggagatatcctgcaagctgaataccattcaggtgccctatggatttaaaccacatcacagttggtgtgatccatgagtcagagaaagcaatgggtgtttactgtgttttagaaatgatgttccaggttataattgcatccacccagatttgctttctttcatgcataagaagtcagtattttaaagtactgttttatgacatcagaaatcagcgaggggaaagggcatggttcctgacctcctttgtttccaaaactaaatcatgatgcagtgatttaagtggcctctctaaccaccatgtgcccatgacctgcatgaaatcgctataaaacctcaacaggcattagcactttaaagaaaggtgacttcctaggtagtaaggtgattttactgtgcactacatttatgttctttaattggcctcagatccatcccagaatcagcagacatcaaatccaacgcacagttcagaagatgtgaagccaaaaaccctcccgctggataaaagcattaaccatcagatcgagtctcccagtgaaaggcggaagtgagtaaccagacacgatggttgtgggattcccttttttaaaaattcatttagttagaagggagaagaatgaaaaatgtgagatggcaagaggacagcagcatttttgtgctttctctccattaaatctcattgacaaggtagtcaatataaatggaagtttgggtcagtctttctggcaagtaaatatgtactctgaatttatcaagttgtaataggcaaagttatgtttttagcccacaaatttaaacattggaaagcaggtgcaggcctgttgtgtttgtaattcatttgagttaaattgcctcagagcctgtggacaaagtttcgttcaaggaaaaaaatgttattctctcattattatgctctcctgtaaggtaattacctgagctgtaatttaattttgtaagaaagtatttttgacaataatagtttctatcgtgtttgaaccatttcaatataataggcactctgttgaagagtttacatatatttctctccttttcatccattaactcactgaacccttccaataacttaatgagattgttcctgccattttacagacaataaaattgaggctcagggaagttaaataacttatccaaattatttaactgattaagtagtagaggaattcaaaatgaaccctcagtttcacgtaagatcatatttgagccagagataccttataacccaatgtttaaaatgttaacattcatagtactgtaaccaatcattctacctagagccagactacctccattcagattttgactcagccacttgcctacattggaccttgagcaaattacttaacctttctctgcctcgtttataaaatgggaatgacaatagtccctacctcatagggttttgtgcctggctaatagtaagtgtaggtgatgatgatgataacttgttttgtaagagaaaaatatttattgtcttatttttcttgttacattttcctttttcccagtgcaatatttgaaccatttcctgtttctcttatgtctatccagtttcatttctatttgtctgtatgacactcagaatcaatagaagctaaaattggctagaagtaatcactattgttattgattattgcagtgatgtttaatcttttttaaagcattggtacttatactttagggtgttacatgaaaatgtgatatttggagaagacaagcattccctggcgagggaggtttgggtgggaagcgggatcagggagttatgctgaaagcggaagacacatggactcccacgctgttcgcttctgtgctggtatttttctttcccttgttcttttctgtgttctaccccttttctttacaaatgatattaacttttaaaagcaagagcccagagctgatggcttaatcacaggcagggctcacgtacaaccgttctagtagcttctagctgggggctattctgacttgttgatgcccacgacatatcagttgttacatgttttgaacatgacccttcatcccacgtatccataatgaatttgttgataagggaagtcactgaaaatagctcctttaagttctgccctttatctctgggctctccttgaagatctgccctggatccctcctcatctttccccttccacggagtccatcgtttttatatctaattagcatgccaaagcagtttggctagcaacttttaaaaaacaacctggcaattttagcgaatgaagaaattaactaaaaataaagattataaaaaattctgtcttttctgttcagcaatgccagcatgccagcctggttttgattttatgtagctaatacatgtacaattcttgctagacattattactatttttgttcattaaaaaaaaaaatactgccaggaaatgctgtggtctttgatttggttgtcacaaaagttttattttattttattttcctaatctaaaatgtctttttttaatggagtttggcttctctttgcttgtcataatttttgactcctttaccacattacaggaaaagtccccgagagcacttccaggctgggcctttctctccctgttctcccacccctcccggtcagtcaccaaacaggtacaagaggtcagcaggcctttctgaggctgctttgttatgactagagcttgccaagcatcatttcaactgaattagtgcttgccaaatgattttgagggatgtgtccatccacatctcttcctacacacacacagaggcaaaaggaaagagaacattgtccatctgcctgcagatttatcagctgcaatagaaaaagtcaggcctgtgacattggtgccgctatggccatagggctttaattacattgtgtggaacctccaatctaataataaaatccaccagacaaccgctgggctccaaagctggcgcctttcccttcaagagggctaagcccttctaggcgggatccactgatggctcttacagagaaccaggaggaggctgacaaacgaaacttcatccttctaacctactccagctctctaatgatgacttctggacattagctgggccccatgatatttttaaaagccgcctgaattcccgttccctggagagacaaattactgagtgctcagagattttctttgatgtagaaatttcatttaactactggataagagggaaatcctaataaatagcatttgattggggaactcttcctcttttctactgtcttcctttctgtttctcctgtccctctgtatcctgctggttttcaaatgatattgcatatttttaaattccttgtgtaattccaagagtttctcagacatttggcatcattgcaatgtgatcttagttatataaaagctgcctttcagaggacagctatctagtttcagatgggttgctgaaggtgtcctcaaggtatcctctcacctggttttgctctgctggtttggttccagtccattgctgggcactgtactgggtgctgcaggggtacagagaggaggtagatgcagtcctgccctcaagaggcttccagtttagagagaaggcaagtgccttcattcacagagtgtttgcactggaagaaattgtagagataatctggtccaatcctttcatattaaaaggtgaaagagaaacccagagttagtttattacaccagatcagagaacttggcgacagagcagacattagatctcacctctccgggccctctgtctagtctgctgtatcacaggtgattatttccaaacaaaaatgttgttttcttaataagtaaaaagaaatgctatagtggaccagtgaaccacttatgggaaatttaaaagcaatattgaaaccccaggaaagcgaaactcagttatcttttaggacttataaaaaaaagtatgataaatatattgaatcatgttgaggcatttgaatagactacaacacaaacttcttgaaacaaataacctaataacttaaacacacgcaccagattcagtaccacagtggagacccagtatatttagtctggcagttgtttgccatttatatctaatgtttaatctcctattcatcatcagttctgtcattctcatttcattcatgatataggcatcttaaaaatccatattttcatttttgcatgaggttacatgtctgtgtgtttgaccaggtattctaaactgaagtttttattcttatgtatatttttaaacctaggtctataagtggaaagaagctgtgctcttcctgtgggcttcctttgggtaaaggagctgcaatgatcatcgagaccctcaatctctattttcacatccagtgtttcagggtacgtacttactgctttgctctccagacacaacttcatgatgtcttttggcatcgttccgtgctgaaaaatgcctcttggaaattctggagggctttgtctgtgaggtctcactgtctaggttgtatagacattccttcagaatgaaactcacctatcacgaatccctctgggatgtcagattagaagaagcagaaaggtttgtgcaatttgtccttacaaaacagtttttgttgctaaagaacatatactccagcaggaggctgagaatgggatgctggggaggatgatgctcttccaaatcttttagggccatgtggatttatttggaatgtaatgtctatgctgtttcttaaactcttatgacttaatgtgaaagggttttagtctttgacctagtggaaaattgtctgtcaattaagtggctagttagaaaattgtaggtctcagaatgaatatgtctgtaatcttagattaaatatcactccctcaaaaaagctgccctgcccacccagactaagttatctttgttataggtccttatagaacctttcttggtccttattactgattattggattatttaaatattatctcctctaataaactccgtaagggcagggaccatgtctgtcttggttaccattctttcctctctacctagcagagtaggtgtcaataaatatttttacgtgaatgaattagtgaataaactgaaaatgaggagttctagattctagtcccagatctcttggtaataagtaggtgagttaaccagttatacctgatttattatgaaatttataagctggactatatcagcatatcctgtattttccactcatggacacatttcaaaataatatataatttttgaaggcgaaccctctgtctctaaggaggagtaatttcttggtctgcataatcctaacatactttcttttcccttcttggattttcttttatttcttgttggtagtttccttggctatgaagtaaatttgcctgggtttaaaataactcccactttgcctataagctaagagaaagtcagtgaagttgtccccaaattactaatttaataataacagtaatcacttgaaagcaagatttatcatagacaaaacacagcatagatacttattttagatttcatttatcaaaagtattagaatgagaccagagtttcctaagttttattttatttctatagagaaccattccacaaaggacaagcaaaaatattctcgttgtaaagattaacctagataatgtatgtcctaaatggtctagggatgttttgaggctcaaggaatatgctttttaagatttgtagttatgccaagataatatgcattctgagaacactgcattctgttctcagaaactttatgaggactagaaataagcaaggtggtaagggctctttgcagattctcaagggtcaggagacttgccttcttaactctcaaggcctttattcactctaatcattcacttcctggagctggcctgatgctttaaggtacatcccctcttggatttattccccactcttgcaatgtagaggcagcttatgacataatttggattaagcctcactctgtcccaggtcaccttagagcatgaattaggggctagatcctggtccccctgcaagaggctggcacccacaccaacttccactgcctttctacccttctggtacaaacatccaagtatatcctacagtctctttctgcactcagcctgtgttggtggaaattcccagtggatttgttgctctgaatatcactgcttttaatgtggaaatataaaatggaacagcaggctgggcacggtggctcatgcctgtaatcccagcactttgggaggccaaggtgggcagataacctgaggtcagaagttcgagaccagcctggccaacatggtgaaactccatctttactaaaaatacaaaaaaaaaaaaaaaaaaaaaatagccaggcgtggtggcacacgcctgtaatcccatctactcaggaggctgaggcaggagaattgcttgagcccaggaagtggaggttgcagtgagctgagatcatgccattgcactccagcctggcctacagagcgagacactgtcttaaaaaataaataaaataaacaaatggaacaggtacttcctagaaattttgatctggtagaacttagcaacgatgctggcaagcctttaaagattattgatggacacatttcaattgataactcattggccatgtgtttatttaaagccactagggtttaatgtgtttaaaatggttcttccattttgattgagaaacggtgtatgatagaggttaagacgctaggctttggagtcaacctgctaccacttatcagctccacaacctaggaacaagccaacaaacctcactgaaccagtgtccttctctgtaaaatgcaaggaattaagctaaaattgctaactgtatatttgcttttgctgtaagttgacactggtgcagcatcttacacataatagatgctccacaaatgtggtgattgtagaagggattattgtgctattcacataaacagtaactaagcattagaaagaaacaattccttatgcatcttatgatgtctgttctttttaccctatagtgtggaatttgtaaaggccagcttggagatgcagtgagtgggacggatgttaggattcgaaatggtctcctgaactgtaatgattgctacatgcgatccagaagtaagtactggggagaatgcctcatgatgaccgagtgtaatcgtatgtcttccataggacccaatttaggaattcaaatatttttccccagccgttgacactctaatctgagagaaaggtttcttaacatctaggttaaaaaagaaaagatatttaccactcgtttcttcctggaagttattgctacaatgtggaccaattctttttatcctgaagtgcatcagcacaccagcaggtcaaaacattgcctgagctcactacagagattttggtgtgatagaaaggagatataaggtctgtcaaacactgtcacttgttcaggcatgtctttagacgactggcaccatttggggatggttaaatgtggagagcggctctccactgtttctcagatcgagcaccaactcatcaatgtctccacgccctacattcaggagtttcattacgtcatatgtgttcccaactgaatggaaagttccttgagagacaacaatgagggttccacttctctgtggattcttccccacctcccacctctacaatatcttagtaacaatatgcgcttaacaaattatttgctgccttagtaagtgagaagcctgcttgctttcccgtcttgcatccgggcctcctactgtggaaggtgcatgttagtttgcggggcagcagggggtgctgttgcctagccgctgtttagaaaatctgaaaatggccagtggcttgcctcggaatgtttcctcattctccatcatgagtacagtccttctggtgggtcacctagacagcagaagaccttttagtgcagattcatcagtcagaaactcttttaaaaaattggagtgaagatagggagtgtgaaattcaagaatgactatttctcaaagtgaagtcacgtttttactgcctttttacatggatctcaaatctctgcaagactgaaaactttgagaataaaaattgaaggtaatttgttttatagctatagatttagtaaattcagttaaatatgcctattaataaaatgggaaataaaaatttaatcaaacccaggtagtttagatttataataaatatttgacttgagatcaaaacagttccaacttagagccgctgctatcaaactggactatttagatcatgcatgatattagtttttatactatgtattttatatattaaattatataaatagtataccatatatcataaatatatacacacaaattaacatatatagtacatgtataataggtaataattatatacattttatttaaactggacttttgcttttatatgctaacaaggaaaacaactcttttctcccagatttcaatgcgaattttcctatcgtcttctataaattattctttttctctacctcagtgaaccacagtgaatgtaatttatggaaccagaagagggcactgttaggttgaaggactgctcagaaagatttgaaaagtgctgtagatctgagtttgtttaataatttaaagtgcttgaaggatgccaacagaacaacctgaacccccctctgggtgacagtgacctcttttcatctagatttttttaaattgagaggttgggtgattctttgtcatttcttttggaaattagctttttaattcaagaccaggaatttttctcttaaatatacaaatataaagggcattaactgcttttaatttcaaaaccatggagttcctgtaatcagctgaaaaataagaaagtgatttggaggtaggccacaaaaatgattttttctttattttatatgtgaaatgcagtgttttaccaggatttaccatagaaaacaaggcccattgttttctctgcttctatagacattcaatgaataaataaaagttacagatgctataatgttagaaaaattgaattgttcagaaagacaccacattaaaagggcagatctccattgtaatcaccttccaataatttcttggggtaggggcagaatatatgtttgtacatgtgtatgcacacacttgcacacatgtacacacagagatacatataagtatgatgtatctacctggatttgtgttggtttttatttcacataggtgatgatcatatagtcatggtgttctgtacttggtttttgttgctgtcattttgaacttaatgatatatcttggtaacttttccagataacatgttgtgtctcctttttctttttaatgacttttaaatagcggcatacaatcccattgtgtggacttataatttaaaactaattctctatgaatggacactttggtggtttcccattttttaatattatttttaaatgaacatccttgtgcatatatcttggtgaatatttcagagcatctccataggatagattctgagcagtagcacaggtgacgtaaaaggcatgtgctttttaaattttcagacatcttgcttaattatcattcagaaaagtgcactctccctgcaaaatgtatgagagaccccctttatttcctccaagcctgtatcagctctggatatcatcaaacattaaaaatttccactctgcttggtgggggaaaaaatctcattgctttgatctgtatttccataattatgggtttgaacatcttttcatatgtttactcactatttatatttccttttctgtaaagtgcttccctagcctttgcccattcttctatttggcacctgatttgtatgagttctttgcaaattaaagaaatttgccatttgttatatttgccgcatattgtggttattagttttcccactctgtgatttattttcatacaaaagattttcattttatgtaattaaatatatatatttaatacatataaaagaaatatatgtttcttttttggattataggtttcttaggaaaactctcatttaaagtgtataaataaatttagctgagatttcttctagaattgtttttttttttctccttcacatgtaaatatgtcataagcaggattgtatttgggggtaaaaaatgaggtagctatctggcctgattttttttccagttagccacttgtatgaatatcactgaatgaataacccctctttttctcactaatttgaaatgccagctttctcataaactaagttcccatatatatttaggtctatttctggatattttattatgttttattaacctatttattctccattactgaatgtttttaattattgtagcttcataatatgttttaatattgggtaataagggtcaccttctttccaattatttttttccaaaattttcctaactcttctcccatgttcatttttccagataacattaatatctttaggctaatttcaattaagttaactcatgacagagagaatgaccagcacatctgagaatactgtttaattctttgctgatgtcctaagaaataaatataccttaggaatgaataggtagaggggattataatttggattgagaagtataaatatgcttgtattggtcaaatatatccaagatgcaataaaagagtcagaatgggaaaaaaaaaggctaaaaaccatttttctttcttttttaaaatttgatttaaattgagaagagtggagatggatagatgtgaagggtggtttacgtcataggcattctaagtgaaacaaaataatttcattttgtggaataataaaacctgaatatataatcctattttctccaagtaactagtcacatttaaatgaaatttttctcttgaagggaaaaatagcataccagcatattaaaatgcaactcctaaaagcaatgtaaacagtttttaagttcatatgtaaatggaaatggacgtgcaaaacaaattacctgtcatacatcaagccgtcacatgtttaacttgtgccatttgtgcttgggtgttggatgactgtgtctttgtacatggtgttctgttccatcattcactcttgtgaaacgcatttaatgcaaactccctggggtcttttcaaatgttgcaattgcctcatcacaactgtagtgcctaaaaaggagaaatcctgtgaaggtttcagcagaaaatatggaacccaaacaatcctttctagataggtttaccagataaaatataagatacctagtggaatttttttaaaccaagttaaagttgaatttcacataaacaatacattttttaagtctgtgtatgtcccaaatattgcatgctctggatttaacataagtatgtcccaaatatcatatggatatgcttatactgaaaaattctgtgtcgtttatctgaaattatactgtactgggtattgcgtatttatacttgctgaatctagcaatctaatttctagatcatatgtcaaattcctcatattacaatgtacttattcttagagaaatcaaaacctaaggaaactgagagaaaagagattattttcttgcttatttgccccagaggacaaggtagaaaacttgatggagatgctttggtttaggggcaatccagagcatttgatcaaacttcacagtgcatgtgaatcacctgggcaccacgttaagtgggtctggaatgcggcttaagagcccggatttcaaacagactccaggtgatgccagtactacttgtcctggggccacacttcaagtagcaggatgggagaagtttctggtccccaggaagaggagactttggtaaaggcagttgctcattagggaggttttaaaatgtctgaagcgagaaatgttgcctaccactcttgtttgttgttgtttgttttaatcacaggtgccgggcagcctacaacattgtgacacggctttcaagcttccggatcactcaccatttctttactgagagtgtcccctggcaactgcttaacaaaatcccaagctcaggggcttctcagcatttacctaatttctgaaaggctcttctgaaaggtggtatctgttctttcgtagcacagtgtttatgtttttcctgtttattgttttggttttttttttttttttgcatttgcacagtatacacaaaagaatatggggttgtaatgatcctgaatagctcaaaaaaggttttagcatggtcaaacaggcttatggtttaaaatgtgttattctcttctttgggaattagctaaatgatgcaataaacctgttttgttttagaatgtctaggaattaaacactttatgtttacagaattgagctgcagaaagtgcaagacatgccaatttgagacacacggtcttctaagactgaaggataaatttaatgcatttcagaaactaaacatcacagcaagctctatctctgagctataatttgtttttaatgcaaagacactagtttgataatatatactgtaatcctgaaacatttgtgttacttacctttggaggtagaaattataccaataaattattgcaccgttagtattagattctgtgtaccttggaagttatgtcattaatataggctggttcatcaaataaagcaaaaccttgcaatatcagctagatttacactccgggacgttgcccaaaggtaggaagaaagcagagggaaatatttcagtcatcatttccaaagtcattatcaaaatctgtgaggaagtttaatcttccaaagagtcaatgtcagacatcaggcctctgttgcctgcttctctcgaggcactagattaggagtcttcaataagagacttaacatgaggtatatggaagatgaggcaccgagataagttcatcattaggtgtgagcactgctcacccttgctggcaagttctccttaagggcctgaagcacaggtgtccaaagaaaagcgttaagtccatcttaatagaatctatgtggtatatgatgtggtcagcccctggtctgtgatcagcaagaacctacagcacagattatgccctgcccacttcaatgaatacctactctcctccattctccatcactttttttgctatcaagaactccggaccttgcccatggagaagtttagagaggaactcttgtggagagctggtttattttctgccctgtgcgacgagtttcagctggccaagaaaggagtcaagttattaaaaagcatcacaatgtagatctccaggctggttttttgttttttgttgttaagactggggaaagggggactatttattctgccttaaatcaatggcaaataagtcaagatgacattttgtgaatgtagactatggatacactcctaatagattgatgtagtcataaaagggggtcaagtagatgtttttctgttatgtaagcaataatttttccgtgtcttattgagtatggctagcgattatttattacatgctagatgggttctttgcatgtgggttccatataggtgcagaaatttcctcagccactggagggatttcgaccatatttgtcatttggatgagctgttattagattgaaatctacacatcatttcattaaaaattgtgccttagaaaacgcaaagctgttgcacatggcgataaattatggatgcagtacattgaagagagatgaagtcacttccaagtttccaagacttctcatggaggtgtttgctgttttacaggaaaaaataaaaataaaaaaagaaaaaaagaaaaaattaaaaagaaaaattgttttgaaaatgtacagatcaagtccaatattttgattatccacctgcatgttttattaaatattttgataatgtggatgtttacactttgcatgatattagcagagtaccactagtaatgcacaaacatgtacaatatggtcattcataaccgatttttatagaatactttttacatgtgcaactccatccgttatgtaaggattacatgaatattgcacattcccttctggtttcacaaacccatttatacatatttcttagtgaggctcattgtacatgtattgaagctagaatcgagtcaagaaaaataaagccccattctccaactgcaaaatgtgctttcccataatgaacactagtcaccagcacagaataatctccaacattttctaaattctaattgccaactgtttctatttatatttgatttatatttcatttggagtctgttacatggcagcttaggcagactagatcttgttttttccaatgcagcataatgagtatgatctatttcttttcaaataatctttgagatcccaggaaaaaaaaaatgctctgctccattgagctataatgtaaatgtgtttgtttaaaaaacaggtgaggcaagtgagtgatttattgttcctgaggaagtatatctgattttttttctcatactccaaaagctagtccctactctttaataaaaataatgggtaactttttgtttttcactagcgaacttccatgacatttcctttctatgtagtgtgattaatgcaatacatattatagttatctatacacagtgtaagatttaacaaactgaaatgatccacctcatatgtgagtccgtccaaaagatgttactgctctgggtgggccagtgttctatatcggttatactaactttcatttaaagtatttattctaaaatgcctctgagaaacagtaaaaaataaaaacaacaagttgtctaaaatgcaacagcttttatagtaaatgtacatttataaataaaatactcaaatcaactttgtattccattaattatttttggaggggtggcagttggttttcttacatggggaagagagactcaagctttctcttgtagcttttggtccagggttacatagacagatgatggcagtgctggatgtttgcatgtacctattgatgcatagttgaggtcaactattgaaggcaaaccaaacttactggctggtttaggggtcactgaggaattgccttctatagaagggtttaagctcctggagatgagacacacaataaccagcagaggccatgcaaatgccagtgaaactcgtctgaaacaaccaaatgatggtcagcttgcagcactggctagacaaaaagcaaggcaaactttttttttctttttctttttttttttttgagacagggtctcactctgttgcccagaatggagtgcagtggtgcaatctcagctcactgcagcctcgacctcctgggctcaggtgattctcccacttcagcttcccaagtagctgggattacaggcatgtgccaccacacccagctagttttttgtattttcactagagacgggtttctccatgttgcccacgctggtcttgaactcctgggctcaagcagtccacccgcgtccatctctcaaagtgctgggattacaggcatgagctaccgcacccagccaaggcaaactttttgaagtccctgtattctgccactttccccagcactaccccaatgttccccacttattatatatgtaaggtgtgtttactaagggccttttcctcaggtgtggagccagggaatctgctgtgaatcagtagcatcctgctgacactgttggctctctgaagtatacacgtattctgccttgcactctgttccaaatttgaaggtggtggcaatactaagcaaatcccctgaaattttcaattgttttaacatgtgatacttttttttttttttttgatgaagttttgctcttgttgcccaggctggagtacagtggcgtgatctcagctcgctgcaacctccgcctcccaggttcaagcaattctcctgcctcagcctcccgagtagctgagattacagccggccgccaccatgcccagctaattttttgtatttttaggagaaatgaggtttcatcatgttggccaggctgatctcgaactcctgacctcaggtgatccacctgcctcagcctcccaaagtgttgggattacaggcgtgagccaccgcacccggccaagatgtgatattctaattgccaccacgcattgtcttctttttgcaaagtttggtggacggttagtagttgctgctgtttgcatggaaaagtggattcttctcataagagagttttagtagctatcaggtgaacttaatattttcattgttatttaaatgaaagcccattgaactaggatgcatttcaaaacaaagactattactctaatatgaggtctatgaaaaatatctttattcaaaaacaaacattttgcctcaaggtt

SEQ ID NO: 321 - DNA, 21950 bp, Homo sapiens
  source 1..21950: mol_type = genomic DNA
cgcacgtgcacacacacacacacacaaacacacacacagagccacagcgtgagaattccaaaaggttctgcacactcggtggagaagattgaattcagagcaagcggatgcccccgaaagcaggctctgtccctttaaatgggttgtagtggtgggggaggggaactggccggagctggcattgtccagtttgaactgaacaccggaagtgaaggggcagggccagggccgtgcactgagccccgggccattgtccatctccgaccagggcagtagccacccccactagccagccgtctttatctcctagaaggggaggttacctcttcaaatgaggaggccccccagtcctgttcctccaccagccccactacggaatgggagcgcattttagggtggttactctgaaacaaggagggcctaggaatctaagagtgtgaagagtagagaggaagtacctctacccaccagcccacccagtccctctctcagcagtggatggggatggggtgggggtaggacgagaaggcagctggtggagaaacagcttcaagactctttgggttcctcctgctctccagggagcttacctggggctaactttagacacacaggtttggagggaggaaagaaggaagaattctttacaacgaatcaattaagagcactttctcttttctaactgggggaggcccagaaaaactctgagtcagaaactctgggaggcagacattcagatgtagtcagaggcagacagactttggaaggcagcgctttggtcaggacagatcagccctgtgtgtccccagcctctcccctgctcccccatcccgggcttcccagtgtccagaactccaggtctatctaagcacacgggggtggggggtgagagcgggtcagctccaagcagccgggtcagctcagaggcctgagggggaagagagggggaggggagctcaagggctgggggagggggagggcccattcatttctcccttgacaggtggtttgtgtttctgattggccagcgccgccaggctcacacctccctcccccaactctctggaatgtataattatctgcccggggggtgggggtggtgtgtgtgtgtgtgtgtgtgtgtgtgtgtgtgtgtgtgcagtcacgtggttttaaaactaccccccccaccaggtcccccacctgtatctgctttggggacccctactgagtccaaagtgcaggatctcaaattccggggtactcaagtcttctagggcagacagacccatctccagttgtgcgtgtggggagggggtgtcaaacctcaaggttctgagaagggacaccccagaggtgtcagagaccggagttgtgggggagggccggagctggagccggagggaaagggaggggaaaggagagggaggggaggggagggggctgcccgcggggggttgggtcattgtcttttagaatttgggagcctttgaaaagccgtgggccctcccaccgctattgtgcgggggaagatgtagcagcttcttctccgaaccaaccctttgccttcggacttctccggggccagcagccgcccgaccaggggcccggggccacgggctcagccgacgaccatgggctccgtgtccaaccagcagtttgcaggttcgagctcgggacttagcggggacactttaggattcaggggcggccaggagccacgtagaagggaggtggggaactgagtcctaggctgcccaaaggaccccaagacggtgcggccttctgcttcatagggccgtctctggggccaggaaccttggtgtcccagtggcgtgcgcgccagactacgtgggtggatggagaggagaggcttgtcccgccgtgagtctctgggaaacgcgttgtgggaagaggagcaaaactttcggggcactactgtcccggtgtacgctaggggaacgcgggaggcgaccgggataggtttcttctcttctgttgcttggtagctgccccctcctggctgtccacttgtggggctggatactcgggtctccctgcctggggcccgagacggccctccgattccgtgccccccagctaagtgcccggccctccctctctccaggtggctgcgccaaggcggcagaagaggcgcccgaggaggcgccggaggacgcggcccgggcggcggacgagcctcagctgctgcacggtgcgggcatctgtaagtggttcaacgtgcgcatggggttcggcttcctgtccatgaccgcccgcgccggggtcgcgctcgaccccccagtggatgtctttgtgcaccaggtgagactgattccggtaactttgcccagggaagggcgtctaggcgcccatatccacgggtgggctccgggctcgcagttgaattgagggccatcgggagccctcattatgcatccctgtctttgcttcggcaccccaattctgagtccctgttaactatctcgtgggggagtagtgggaggcagcaccaattatcagcacccccgcccccttccgggaacccctccggcttaccacgtgtctattacctctttcccctgggaaggggcagggggcagggaggtgaccccatgtggcagaaactaaggttgtattgtgcttgccggtggggggagggcgagcaggccggccagggaagcacatgccgggcctaagccgggagcccagctcctccaacgtctgaatggagctcagaaggcgggagagagtgagggcaactggctactggacccaaggggcgtaaagccgagaagtcagcctcatcccctttttaatgcagacctcacctggctggtcactaaaaactgggtttggcagatccctgaaggatccctgtgggggcttgaaagctcaggactggggtctttgctgtccagttcccgtgaggaaggaaaacccaaagagcccaggccttccttacattcctgggccaggctgggagggaagtcggtaggtcgcaaccccaagttctcagttaaagcagggcagcacagtagggggtgaaattcagtgtcgcagggcagggggtgaagggaggctggcctctggtcctattctccgcttggcatttatggccccagacagccattgattgctgtcttaacattcctggcctcaaacaaggagccagagacttcaggtctccctcctcccaggcttccccttcctgaatatcctagaggcattccggtggtcctgggccaccagctacccataaagaccatggaaaggaagttgcttgctgcctatggcccttccatctttggaggtttgggactggatctggaaagaagaaattgctaatcccagatcgtgtaggttgacacccaggccgggcagggaggggttacttaagggaggttggctttaggaggtgtgggggaggggaaaggaggatgtggggattaagggttggagcctgaagggatggcattctttgggggaggggtagagaagggagatgctggatggactagttggaggcagcagggacgtctttgagcacagccttcagtgaggaacaaacaagggaaatagacgcagggagatggggagccaccacttactgttggggccatggggtcagtgggctacttgaacatctgccaagaggacctgcagcaggatactgagctgcccctttgcagcacccttattcccccaaccccccattagacagctagtttcccactagtggcttttctcccttctctgtctcatttacatatgtgaatgataacccacaggaagtaattgtgggagaaagaagggaattggcctttttagatctattaaatcactttattacaggaaccagctttgaatggccctcctcagcagggtagcaagcctcccccactctcccatttatctgatcacaaagagattaaaatctttcctggtctggggactggacagctcccccaactttgggaggctggaataaaagagtcagacccaacgttttctcatctcccatccaaaggctgccagatagggaggggctgaggggaatgtatcccctcatcttctgggttccttggtgatatacataccccaaggaaggtgttttcttgttttgtttgtttgtttgtttgagcaaatggggacttgggcctcagcaggcttcaccttaggatctagagcaattgggaaactattggatggcatagagcaggcattgagtctacaccatgctgggtcagatgtgctggcttggaaatactctggattttaggctcttggaacatccaggaacccatagttgagtaagttgtcaatagggagctgagctggaagagaattaagaatttgtctctctaatccccagctcttcccattctactcacaaagcacaatgatgggtggaaattccctgagcctttacctggtagctctgataatggtagcatgccagaaaggcttgggtcaggggtcctccaaccccaccttaaccgtaagttagattagtgattccagtctttgcacttgtttttttgtttgtttgtttgtttgtttgttgctttttttttttttttttttgagatggtgtttggctcttgttggccaggctggagtgcaatggcatgatctccactcaccgcaacctccgcctcccaggttcaagcgattctcctgcctcagcttcctgagtagctgggattacaggcatgtgccaccacgctcggctaattttttgtatttttagtaaagacggggtttctgcacgttggtcaggctggtcttgaactcctgacctcagatgatccgcccgccttggcctcccaaagtgctgggattacaggcatgagccaccactcttctgcatttgtgaaattagaaatgactctctggaaatcttatggtaaaggaatttagtaaacacaggataaattgtttactgggggaggaggaaagtgttcccgaagcagagggtaagaaatctttaacaaaacttcccattctttggctgctggggttgggcaccctggggttggggtgggctggtgagaaggtaattgtcctaagatagcatctaccagagggagggggtcagggagcccctttgcaaataaagaggaagggggaaaggcaatttaaaaacattttcttttcctttccaaagttggggttattaggatcccaatgccctgttaactaatgttcttatgctctctcccaaatgctgtaatatcctcttcaagagtagatgagtggggggaaaagcccacccccagccaaaaactaagcaaaacgacaacaaaacaaaaagcaaagagatttctataacaactcttttccttaggtacacatctttagatctagaaatctgcctgtctctagagttagggaaatagatagcaagcccttaaattagagtttctcgacttcagcactattgacatgttttgagcaggataatttgttctggggagtctgtcctatgtattataggatgtacagcagtattcctggtctctacccactagaagccagttgcatcttaggtatgacaaccaaaaacatctccatacattgtcaaatgtccccttggagtcaaaaatctcatccctgcttgagaaacacagttatataggaaagctggaacaagaaagctaaactgtcaactattttcctgagattcatcaagaattcaaaaatcctcattttgggccattttaagagttttggcttaactcatgtttcctgtggctcaatttgcaaactctcaagatttatagaaatttggaaataagaaaagttccctgctttcccatagctcctcaggacccagatatgtttcaatctcaaatatgtttaaattggctttctggctaaaatgctatattagaagacttggagtcaaaagcccagatttgaccaagggaccaagttgggttaggagaaaaggttttcaatacctagacaactgctgaaattgccctgtagccaggtggccttctttttctaaaagccatgagtgaggaggtggtaagagcaactttattcagggtctaggttaggactgctgggtttggtgttagggttgcgggggcgggtggggaaatatacggaatctttcctcctggtttgtaacactgcacctctgattactcacctcatgtctagttattgaggtactggtcttatacccttctctatgtaacccataagctctttgaagggaggaacttagctgcctggttaattttctagtatgcatttggtgggctgaggaatgaataagaaaaggggcatcttgaggaccttggtgaatcagaagtacacttagcagtctggggtccatgttggcagagatctttgttcagagaaaaagactagagatactgaggggtgtcaattgtagctgctcgctttctgggctgggcacaacatagaatatggcctgggcacaacatagcactatgaaagtttgtggagtgaatatgggtagatcaccactcggagcccagagaggttcctctcgtttttgttgacagagtggaagccacggatttagtggtcatccatgagttatttctgtcttaataagaaaaggcagcttaaaaataaattgactcgatttttcagaaagttggtagagaggtaggaaggttcatgaagacattgtggaatcttctggggtcctcttctttctgagacatgcttctagacaatgtcttttttttatttttatttttattttttgagatagagtcttgctctgtcgcccaggctggagtgcagtggcacgaactcggctcactgcaacttctgacttttgggttcaagcaattctcctgcctcagcctcccaagtagctgggattacagatgtacaccaccacacccagctaattttagtatttttagtagagaagggttttcgtcatgttgtccaggctggtctcaaactcctgacctcaagtgatccacctgcctgggactcccaaagtgctgggattacaggcatgagccatgatgcccggcgacagtgtaaagtaaaggctgtgacaccatcctgaacaaagcttcaaatatgggatgtttctaccctctggttgttgacactgctgcctgccttacaagtggttttcagtaacattcaccagggccatttagttttttgaacattgctaatcacactctactggaattcttgttttttggagtaactgccctaggtaaaactatgcctcctgtcttcctgcaggcatgaatagcaaccactggccacatagtcagagtgggaggtcaaaggagttgggggagaatacacagttgatacagacttatttaacatgatctcaccatcgaggttttttattttttttgagacggaatctctctctgttgcccaggctggagtgcagtggcgccgtcttagctcactgcaacctccacctcccaggtttgagcgattttcctgcctcagccacccgagtagctgggattagaggcacctgccaccatgcccggctaatgttttgtatttttagtagagatggggtttcaccatgttagccaggctggtctcgaactcctgacctcgtggtgatccgcctgcctcggcctcccaaagtgctggatttacaggcatgagccaccatgactggcccagcgtggtgttatttaatttagacaggacttggcttttctaagcagtagaatataagaactgagtttctggcctaaaagtctaggaacctttcattcttatccctgatcaagccggtggttgggtgggggcagggtgggacggggaggacaagatgactgccctaaggagctgtggagataaatctacccgaacacttgagttcacagctcagaccaggtagcgggccactcagtacctcctggtataggcgccctcgggcttacctttgggcagacaggctgagcagcgccatctggtggagaactccaggcaggagctacagggcctggctgtggctgagcagaggggatcagagggattggctgcctgcagccttctgttccagacacccctttcaccaacctccttgacacacaccctccttgacacacacaccatcgaataactgcttctgggagaaccggttggttctcccttaccaaatcttacctccaggaatgaagctaagttagggatgtgacaccacaggactgaatcattaaaattactttcatcagctgcttttttaaacgtagctactagaaagttttcaattatatatgtgacttgcatcataatgaattgcactggggagagttaggccagctgcactcagctcagctcttgcctcttattgcgactttaaccaaggtgcttattaacccctctgcctccatgtcctcaagctgtaaaatgagggtcttcatatcaccccactgcaccagtttgatatgagggttaaatgagttacaacacgtaaagtggttagaatgccacttagcctacagtaagaatcaattagtaacagttattttgcatagtacttagacattcaacaaatgcttgtgcaagctaagaacctagaattgaggtagagacctgcactacagaatcttccggctggaatggccctggaagaagatctggaatagcctcttgcggaagagccaagaaccccagctttaatctgcacaactgtagcaagtaccctgaaattctgttgccacttctggagaaaggacacttaggttcctttgtgttgttttttttttttctcttcatacttttttcttttataatgttttcttttgtttttaactccacatttcctaagtgacccctaaggctcattctatctctaagcttgcaaaggcataaattgaagctgggatgaggtacttggtgtgggttggatagggtaaggcaggcaattactgaggtattaagaagggatcagaaggcctaagtactttaactggagagattccttccctgttatcaaaaaaagaaaaagaaatgcttggggtgggcgcggtggctcacgcctgtaatcccagcactttgggaggccgaggcgggtagatcatgaggtcaggagatcgagaccatcctggctaacgcggtgaaaccccgtctctactaaaaatacaaaaaattagccaggaatggtggcaggagcctgtagtcccagctactcggcaggctgaggcaggagaatggcgtgaacccgggaggcggagcttgcagtgagccgagattgtgccactgcactccggcctgggcaacagagccagactttttaaaaaaaaaaaaaagaaaaagaaatgctgtctgttgtctgatgccacattccccaacacagtaggcccatgtaggctccccacagtcctaacttgaagaaattgggaaaggatgatatgggtcatgccttctctccccctcccctttaaaataatttatctgaatcaataattcaggattggactgaagagacccaaggggagggggtcctgtttggttctatccatgaagtgggcagtgcgcaagccagagaagggagatggctgctgatggtgactttggcaagactgcctggggaaggaagaattttctatatctagttctctcccgtgaccataaccccaacatagagaggaaggaagaaacagttgaatgtggggaggagggagagggagatgcaagagggatctgctccttggaactccaggaatctgaccaccagaaccagccagtgtcaactctttgtttcctggggctgggctctactgggggagctcaggccatgcccctccccctaaggtcttttctttttggaggggatggggaagggggcggggccctgctttgtgtgtggttgggggtggaatgggggtggtacaagaatttcaggcgcttttcagatgcaggccctgggaggctggctctgtggggctgcacgctgattacctatctgataagagaggaattcaaactatgtgttttagaaaggggcgggggaggagggcagggagccacccctggagaccaccagtttaaatctcttgattacactgaggtacctgcaggggtgggggtttactctgtaaaagtcttagacctcagatcctccagtgatgcagtgagtgacctgagaggactagtcaatttcttgttgcatgtccccatttatatgatcctcttaaaataaacctatgaggtgtccatagaggaaggtgttactctccagtcaactggggcttagagaggggatattcttctaagtttctatagctagttaggataaaaccagatgcttggcacttagttctctctgttaacccacgccacccagtgtgaagaggttgataattgccactccctgaggatttatgtgtagcaggcgaagtgctaactacttttcatgtgtaaaacctcacagcactaccataaaattagtatttactccattttatagatgattaaagaaaggagggaacaggccatcagactcaatcaacccttgttcttaactatttacctgctgaatcacagctagaactaggagtgtcccagcctaagacaagctgggcaagcaaatgaagctggaattgcttgggtccagaaggctcttggtctggctcctctaggacctcccaactcacccactaattgcatctcttgtcccaccccgctcaataaaaaataagtcaaatctaatataatctttattttttgagatgggttcttgctctctcacccaggcaggagtgcagtggcgcgatctcagctcactgcaagctctgcctcccagattcaagcgatccttctacctcagcctcccaagtagctggtaccacaggcacatgccaccatgctgagctaatttttgtattattttgtagagaacagggtttcgccctgttgcccaggctggtctccaactcctgagcctcaagctcagaatccacctgcctcagtcacccaaattgctgggattacagttgtgagccaccatgcccgaccttacaaatctaactttaaactcagggtggttactgtgaaacagcgagagaggtattgcacccggcctgcaatatcatcttaaaacaaaaatttggccgggcatggtgtgtaatcccagcactttaggaggcatgaggtcaggagtttgagaccagcctggccaataaggtgaaaccctgtctctactagaaatacaaaaattagctgggtgtggtggcgtgcgcctgtagtcctagcttaaacccagaagaatcgcttaaacccaggaggcggaggttgcagtgagctgagatcgtgtcactgcacttcagcatgggcgacagagcaagactttctcaaaaaaaaaaaaaaaaaattaagtgataaggaatctgtggttccttcatcttgatgaagagcatgtttcatttaagttccagtttggaatattaccccccagccaccagcataaaatacgaatgctacttactcatgttcccttgagccaggactaggtaagtgcacagtgatcccttttgcttctccattttctatgacgactactccttgttgacatatttgacactgttgttttactataatagatgaagctgtaatgaagtctattctgggtagggtctgagatgctgtcacctccgctaatgtcaagttggtggtgcagtaagtggcatgatagaatgagctctgagctttaaatcaggaactctgggttcatctgaccctggctttgctacagaactagctgtatcaacaactactttttttttttttcttgatggctgctggctgtttgctaactgctttataaatatcagtgtccttaaattttggtacaaacgtgcagtgttctaataggattattccatacatattgttctaaatcttgctttttgttttttcttttaacaatattatttggtgatctttctcagctgaatgattaaaaatctgcctcctgtttcattaattcattcaaaaatgtgctaggcattatttcaggtaccaaaatgtggctgtgaacaaaccaaagactttacgttgttcttaatggctgcgtggtattcattattatagatgtaccatatttattcaaccattccccttcaaatacaccagtaggttatttccaatttttttaaagcaacaatgagatactgagtatatgtgtcgtgctaagacttcctactgataatctacttatattatgttgtgtaattcttttttcttagtgatttatggtatatttttgtagttttaccagtctgattatctgtcttaacttttcagtatttttcttaacaatgaggtgtttaaatcctctgaaatgtattttgcatatgtatcatacaaagtctgtaggaatatgacttcctttcccaatggattattaatttttatagcagcatttattgaattatttttcttacctattgatttctccatatattctcagatctctgtgattttccattttaatcctctgatccatctgcttgggttatactgtctttcggtaacattattttgatataatttcaaactttaaaaaggctgcaagaacaatacccaacactcccacataacctctacccagattcattgactcttaacattttgccccatttgctttatcattctctatcttgctacagatagttttttttttgaaaccataagttggagacagtaagcacttttatctctaaatatttcagtgcgtatttcccaagaatgggaatatttatcttttttttttttttctgagacagggtctcactctgtcacccagcctggagcacagttgtgtgatctctgctcactgcaacctctgcctcctgggctcaagggatcctcccacctcagcctccccagtagttgggactacaggtgtgtaccactgtgcctggctcatttttgtattattttgtagagatgggtttttgccatattgcccaagctggtctcgaattcctgggctcaagcaatccgcccatcttggcctcccaaagtgctggggattataggcatcagccactgtgcctggctgggaatatcaatcttacatcgtttcagtacactaatcataatcaggaaattaaacactggtacatttatctatataccatatgcaaattttgtcaattgtcctattttttttttttttttcctgtttcaagatccaatctggaatcttggatttcattgaactgttcagttcttcaggctttgtctttttatgaccttgacatttttgaagtcctgttttataggaatgtccctcagtttgggtttgtctgatgttccctcaaggttagattcaggatgtgcatttttaaagtcataagtccttagtgcatcatattagaagatatgtgtgtcccattgtaggcaaagctaaactcaaagaacttgactagggtattatctgccagttttctccactgtaaacttgctgtttttccctttgtagttgctacactgctgattatatccaatttaaattgtaatatctggtattcttggcaatttatattttcccatagcctttagaatcactcaatcttccaatccaagatcgtggtatgtttttgcattttttcctttaatatatttgagttttttcttcatataggctttttaccttgttaaatgtattctgagggttttggtgtttttgtttgtttctgagagagggtcttactctgtcgcccaggctggaatgcagtggcataatcttggctcactacaacctccgcctcatgggctcaagtgatgctcccacctctgctgggattacaggggtgagccagacagagtctcgctccatcacccaggctggagtacagtggtgccatctctgcaacctctgcctcccgggttcaaacaattgcctcagcctctcgagtagctgagattacaggtctgcgcaccatacccagctaatttttgtgttttttgtagaaatggcatttcgtcacgtaggccaggctggtgttgaactcctggattcatgtgatctgcccacctcagcctccccaaagtgctgggattacagacaggcatgagccactgtgcctggcctattctgtttgtttggttttttaacatgttttgcagccattattatgatttccttttttttctttttctttttttttttttttttttttttgttgttgttgttgcccaggctagagtagaatggcgcaatcttggctcaccgcaacctccgcctcccgggttcaagtgattctcctacctcagcctcccaagtagctgggattatagatgcccaccaccacgcctggctaattttgtatttttagtagtagagacagggtttctccatgttggtcaggctggtctcaaactcctgacctcaggtgatatgcccgcctcggcttcccaaagtgctgggattacaggcatgagccattgcgcacggcccattagtattatttcttaaatcattgagcatcttgagtttgtttttttgtttgttggtttgtttgttttgcgacggagtcttgctctgtcacccaggctggagtacagtggcgcgatctcagctcactgcaagctctgcctcccaggttcatgccattctcctgcctcagcctccggagtagctgggactacaggcacccgccaccacgcctggctaattttttgtatttttagtagagacggggtttcaccgtgttagccaggatggtctcgatctcctgacctcgtgatcccctgcctttgcctcccaaagtgctgggattacaggcgtgaggcagcgcacccggcctttttttttttcttttttaaataaggcatatcatattgctttgattataaaaataccacttgattttgtattttttccagtattctacttatttggtcttttgatgatggtataaatactaagtgaggcattatgtgaaaaatgaatatttcagtgcttcatagcgtgacattttatttttattttatttatttatttctttgagatggagtcttgctctgtcaaccaggctagagtacagtggcatgatggctcactgaaacctctgcctccggggttcaagcaactctcctgccccaactgcccaagtagctgggattacaggcgcccaccaccacacccggctaatttttgtatttttagtagagacagggtttcaccatgttggccaggctggtctcgaactctggacctcgtgatccacctgcttcagcctcccaaagtgctggggttaaaggcgtaagccaccgtgtgtggctgagccaccatgcccagctatttttacttttattttatttatttatttttgagacgaagtcttgctgtgttgcccaggctggagtgcaaaggcgccatcttggctcactgcaacctctatagtgtgacactttaaatttcgtaattttatatttgttgatttcttccaaatgcttgtatttacaaatttttctgtttgttgttgtttgtttgtttgtttttgagacaaagtctcactctgtcgcccaggctggagtgcaatagtgtgatctcagctcactgcaacctttgcttcctgggttcaagcaattctcctgcctcagtctcccaagtagctgggattacaggtgcccgccaccacgcccagctaattttttttatttttagtagagacagagtttcaccatgttggccaagctggtctcgaactcctgacttcaggtgatcctcccgcctcagcctctcaaagtgctaggattataggtgtgagccaccgtacccggccctctgttctattttattaagaactttaaacctgaatagctacaaaaatgtcatggcatctgcttatataattacgatttttgttaatgtactggtagactttgttgttcttaatcgtagtgactctttgagtcagtttccttaccagtaaaataggagtaccatcacatttgattcctaccctacaggaataagagttccttgtcttttggtataataatggaaattaatgttaaaatttactgcatttcccttcaccagagtaagctgcacatggaagggttccggagcttgaaggagggtgaggcagtggagttcacctttaagaagtcagccaagggtctggaatccatccgtgtcaccggacctggtggagtattctgtattgggagtgagaggcggccaaaaggaaagagcatgcagaagcgcagatcaaaaggagacaggtatggattggaaggcagcttatataggttgctaagggcatccccagtctcccaatcctgtcactttttgggtcacactgcaaaagacaaagggaagcctgtggtccctggcagcatctggaaggctgagcgcctgcaataggtgtgggcaagggcagtaggtgaggaggccactgggggtgacttagtgctacttgggacaagtaagtttgctctgtggtctctaagcctcaattgttaagtgaggcagtgatactaacatcctaggatggttttagaattaaaggagatcatagatttgcaaatggtgggacaagacagtattatctatatctgttgctgctttaccaggtctgcaaatggctggtttccttaatcttgcttgggcttaaagccccttagctctgaacagatactataatttggcttctttaatttctcctatattaagggtatggaagaatctctcctatcccccaagttgcagttcctagttggggtcagtaacttatatttctggtatcttggtattttcaagttgacatgaatctgaagagatcacctagacaattagatgtggaaaggacttagagatcatttagtaatagtcctccttttgcaagtgggaagtttggtctctgggaagggaagtaagtgacaaacctgtaccagagcccaggtgtcctcattcgtgggaggcatctggcctcttcttgctcctttctcttacttttacgatcttgctttgtactaggtgctacaactgtggaggtctagatcatcatgccaaggaatgcaagctgccaccccagcccaagaagtgccacttctgccagagcatcagccatatggtagcctcatgtccgctgaaggcccagcagggccctagtgcacagggaaagccaacctactttcgagaggaagaagaagaaatccacagccctaccctgctcccggaggcacagaattgagccacaatgggtgggggctattcttttgctatcaggaagttttgaggagcaggcagagtggagaaagtgggaatagggtgcattggggctagttggcactgccatgtatctcaggcttgggttcacaccatcaccctttcttccctctaggtggggggaaagggtgagtcaaaggaactccaaccatgctctgtccaaatgcaagtgagggttctgggggcaaccaggaggggggaatcaccctacaacctgcatactttgagtctccatccccagaatttccagcttttgaaagtggcctggatagggaagttgttttccttttaaagaaggatatataataattcccatgccagagtgaaatgattaagtataagaccagattcatggagccaagccactacattctgtggaaggagatctctcaggagtaagcattgtttttttttcacatcttgtatcctcatacccacttttgggatagggtgctggcagctgtcccaagcaatgggtaatgatgatggcaaaaagggtgtttgggggaacagctgcagacctgctgctctatgctcacccccgccccattctgggccaatgtgattttatttatttgctcccttggatactgcaccttgggtcccactttctccaggatgccaactgcactagctgtgtgcgaatgacgtatcttgtgcattttaactttttttccttaatataaatattctggttttgtatttttgtatattttaatctaaggccctcatttcctgcactgtgttctcaggtacatgagcaatctcagggatagccagcagcagctccaggtctgcgcagcaggaattactttttgttgtttttgccaccgtggagagcaactatttggagtgcacagcctattgaactacctcatttttgccaataagagctggcttttctgccatagtgtcctcttgaaaccccctctgccttgaaaatgttttatgggagactaggttttaactgggtggccccatgacttgattgccttctactggaagattgggaattagtctaaacaggaaatggtggtacacagaggctaggagaggctgggcccggtgaaaaggccagagagcaagccaagattaggtgagggttgtctaatcctatggcacaggacgtgctttacatctccagatctgttcttcaccagattaggttaggcctaccatgtgccacagggtgtgtgtgtgtttgtaaaactagagttgctaaggataagtttaaagaccaatacccctgtacttaatcctgtgctgtcgagggatggatatatgaagtaaggtgagatccttaacctttcaaaattttcgggttccagggagacacacaagcgagggttttgtggtgcctggagcctgtgtcctgccctgctacagtagtgattaatagtgtcatggtagctaaaggagaaaaagggggtttcgtttacacgctgtgagatcaccgcaaacctaccttactgtgttgaaacgggacaaatgcaatagaacgcattgggtggtgtgtgtctgatcctgggttcttgtctcccctaaatgctgccccccaagttactgtatttgtctgggctttgtaggacttcactacgttgattgctaggtggcctagtttgtgtaaatataatgtattggtctttctccgtgttctttgggggttttgtttacaaacttctttttgtattgagagaaaaatagccaaagcatctttgacagaaggttctgcaccaggcaaaaagatctgaaacattagtttggggggccctcttcttaaagtggggatcttgaaccatcctttcttttgtattccccttcccctattacctattagaccagatcttctgtcctaaaaacttgtcttctaccctgccctcttttctgttcacccccaaaagaaaacttacacacccacacacatacacatttcatgcttggagtgtctccacaactcttaaatgatgtatgcaaaaatactgaagctaggaaaaccctccatcccttgttcccaacctcctaagtcaagaccattaccatttctttctttcttttttttttttttttaaaatggagtctcactgtgtcacccaggctggagtgcagtggcatgatcggctcactgcagcctctgcctcttgggttcaagtgattctcctgcctcagcctcctgagtagctgggatttcaggcacccgccacactcagctaatttttgtatttttagtagagacggggtttcaccatgttgtccaggctggtctggaactcctgacctcaggtgatctgcccaccttggcttcccaaagtgctgggattacaggcatgagccaccatgctgggccaaccatttcttggtgtattcatgccaaacacttaagacactgctgtagcccaggcgcggtggctcacacctgtaatcccagcactttggaaggctgaggcgggcggatcacaaggtcacgagttcaaaactatcctggccaacacagtgaaaccccgtctctactaaaatacaaaaaaattagccgggtgtggtggtgcatgcctttagtcctagctattcaggaggctgaggcaggggaatcgcttgaacccgagaggcagaggttgcagtgagctgagatcgcaccactgcactccagcctggttacagagcaagactctgtctcaaacaaaacaaaacaaaacaaaaacacactactgtattttggatggatcaaacctccttaattttaatttctaatcctaaagtaaagagatgcaattgggggccttccatgtagaaagtggggtcaggaggccaagaaagggaatatgaatgtatatccaagtcactcaggaacttttatgcaggtgctagaaactttatgtcaaagtggccacaagattgtttaataggagacgaacgaatgtaactccatgtttactgctaaaaaccaaagctttgtgtaaaatcttgaatttatggggcgggagggtaggaaagcctgtacctgtctgtttttttcctgatccttttccctcattcctgaactgcaggagactgagcccctttgggctttggtgaccccatcactggggtgtgtttatttgatggttgattttgctgtactgggtacttcctttcccattttctaatcattttttaacacaagctgactcttcccttcccttctcctttccctgggaaaatacaatgaataaataaagacttattggtacgcaaactgtcatccccttgtcagatgtttttgcccttccgataactcccactttcttggattgggactcagaagtttttctgttcagccagtttgttaggaatgaatcttgaaagttcagtcctcttagcacctcattacagtggatttttgtttctagttaaggcctcttgtcctttccttggaagcttccacattcaagaggggattaggggcttggcatgcataagaatggggttgcctgtgccactggctgggatgaaaggatggggccatggcttggggcatgagaccctaataatactttgtcccctactcctcaaagccttttacaaatcttaattaattaaccgcttgcagcaccccaaggagagaaatgtgttgtggaactggggaaattgaggccagaggagattcactgactagctataaatgcaacattttctttgagccaaagtttgctagctttttaatgaacatcgagtttttttatatacatcacaagtcatcaagcaagaacactgaattttaaacatctattcccactaagggaaggaggattttaaaaaggaaaaaaaaaaaacttgattggaggcaaaccaagtatattaacaccgtgcaaggaaacagggaaactggtttaaatcctcaagcctgacattataagagtaagggtaagaagtttcataatctactccagggactttgtggctccttaattgtaccaaaagtcaaagctgacagtagaacctcatgaagcagcaaactactagtggacttcattaaattgtcttgctgcaaaatgaagtaacttggactgaaatttactccccaggctgcaaagcaggaaggatggaaaagctcaacactattcatttctactcatctctagggctttctttcatcatgttgctgtgttaaaataacccctttcattagaaagagtggaagacataatcaattagaaagtgccaataaaacatctcttccttgcctcatttctttaataatattgtaaaatgaaatgcgacaaaaaggttctttgacaattgtgaatttttattccactcaaaacataatactacataaagttgtattatgctttgcaagaaatactggttgtggccgggcgcggtggctcacgcctgtaattccagcactttggaaggtctaggcaggcagataacgaggtcaagagatcaaaaccatcctggccaaaatggtgaaaccctgtctctactaaaaatacaaaaattagccaggcttggtggcacgcgcctgtagtcccagctactcaggaggatgaagcaggagaaacgcttgaacccgggaggcggaggctgcagtgagccgagatcgcgccactgcactccagcctgggcgacatagccagactccgtctctaaataaataaataaataaataaataaataaaaataatactggttgtataagaatctgtaaagaattttttcctcctctttcaattttgagaaaattgaactacaaatt

SEQ ID NO: 322 - DNA, 8121 bp, Homo sapiens
  source 1..8121: mol_type = genomic DNA
ggcccacagggatggggtgagtgtcttaaatgccagatgagaagttaccttgcatcggagcgccgtctaacctgcctcttaattagttggggctaagaggccccagtgactttcaaggattccatttttgttattttcctctaaaaacgatatgcaatgctccagaaagagaaaaccctagaagaatgtaaaactcaagttccctcctacctggtcaccgtgggcaaaaccaaggtgcatggacgtggttttcagggtgtcagcccacttcaggttataggtggtgtccagtgatggggtgggaggatggagagcatgtgcacggggttagtgttgcttccaagcttatcattgccactcttgatttcaggagctctggaagcaaagcggaatagattcacgttatctgagcaggacacgcccaccacagcatgccagcattattttgccagaaacctcacagtccccaggtttgccacccacatgcagagccctgtgtagggtcttagatggcacagatggtgccgggtgccacagccggggttatcctgtgagttgctatgttttcttttcttttttttttttttgagacagaggctcactctgtcacccaggctgtagtgcagtggcacgatttcagcccactgcaacctctgcctcctgggttcaagtgattctcctgcctcagcctctcgagtagctgggactacaggcgtgcaccaccatgcccagttaatgtttgtattttcagtagagacggggtttcaccatgttggccaggagggtctggatctcttgacctcgtgatccagccgcctcggtctcccaaagtgctgggattacaggcgtgagccaccgcgcccggctgggttgctgtgttttcatgactgctttagatcaatttgccaccgacctgcctctcactggggtagactgacttcaaagcttttttctcctccaggtttctgaaagttgttttttgctgaaagcccggttcagagttctcatgtgtgttttggggacccagggcatttaccgaacccggtgagggctggaaattccagtctcagaaagtcagagtcgcacaggatcggggaaacgttcaggcatcctggactgtttggtgacgaggtcacagagcccccggaggatcaggagctgctcgttaaaagctggggacactcagaggctcttgtttttccttggaggatttttatgaattatgatttcctttatttctgtccataattttgtgcttttgctataccaggattttagtcgagattcaatgttatcacctgccttgaagtcttgtctcttgacaaatttgcataattctgtgttgtattaattatctagtgctgcataacgaatcactcccaaaccttgtggcttacaaccacagtcatcactgatgatcttttacagtttctgtgggtcaggattccaggggtggcgccaccaggcacttctgccttggggtttctctcggagttggagttggacatcagctggggctggagtcacctgcaggctggcctggggtcgggcagggggatctgcttccaaggctctgcttcagaggcggctccctcccacggtaggcgcatggtttcctgtctccaaagtgggcctctgcacaaggctgcttggatgacctcatgatatggtggctgctgaccagggtagaggctggaaccccttggatggcccaacctgggaggtactagccatgcctctgccattgggcccggccacacaggttcctgccctcttctccgctgcccttgtgcctcccgtgtcctcgctgcgtcctaaccaaatgctggactggcagagactgaaaacgccccacggggcccctgtggcttgctcactcgggctctccggagagtgggtgccaaccccctgcgccctgagcatcttggctctgcttggcttgcagctggatcccctttttggactttggggctgcacacgcaccttgttctggagcgaatgggctcgtgagagccgcaggccctgaggcatggcctaactcaggcagagtagttggcgaaggccccagagggacccaggctatcgtcctgcagctgccggcgagtgggctgggctggtggcgtcctcagtgctctccctgggatgggctgtggaccccagcaggcggggtttgatgcacgctgcaaccttgtccagccacagcccaaggaagggcgctgaattgaacgtggggtaaaacagtatttatggctgttgattctgctgggcctgttctcagtgcttcataagtgtattagctcattcagccctcaaacagcccctaaggggtagagaccattattatacccattttatggatgaggaaactgaggcccagaaaagctgaggctgcacagctaggaaatgctggagctgggctttaatctcaggccgtctggctccagcatccatgcttttatccgctccaccacgtctccctcctgcccacatgtcctcaggcccatctctttgcctttctgggcctcagtttcctcttgtgagtaagatgggggcggggagggaggcaggctgcatggcctccacagtccctcccagcaattaaatgcatgcccgtggctgtggcatgcgtgaggacagctgcctgccagccttcagaggccagttgttcagctttcaagatgcccccggcccaggagaaggcccggcgggtcgggaggccgggagaattgagaatctgcccggcgggtcgtgctttagctgtcgctgtagggcgactcttggcgtgtaatcacagcatgtggcgcgaggacaaagaacatgacagcagagaaggatcagacagggagaaggcgggagagggcagagcaggccgagggaaagagagagaggtctcccggcgggggccgggcgcgagagcctctgcttccatctgctcggcgaggactctgggaggtgccaggtgagacctgcctccctgccctgcgctcagcctctgtcccagaaacctgagctccaagcggcacaaactccccaggcccccaggactctgttattacagcacaaagccctggattttcatgtccaccaattaagggatttgctgggttgacgattctcgggaactcggtgcagatgctgtattcgagccagcgagggggtggtgagaacctgctaactggatattaaacgcccgctgctgggagagtcgtggtccacagtaggatgtgatcgttcaggctggagggatcgtggggaaaatggtggctcatggaatactaaggggaaggctgtcaggtgcgggcggggctggcacacacagctcaccttcagctgaggaagctgcctgctccgctgccgtcctggcagtcagtgacaggtattgctgagatgtcagctcaagggtgtctgggttcttttttggtattagagtaggtctgtaatcacagaccagaatttgaacttaaaaattaataaacctagaggggacaatggaaatagaaaatcgccgcttacaaatagcactgtggtcatcgtttcaggcaaaaccatcaacggatgctgacatcagcgagcaaaagtgtgatgaagaacggcgatttgcatcgtttcaaagtatctctccatgagatacttactaatttcaaaggggacaatggccaggtgaagcctggcagatgtcacttacactgagtgatccatgttgccatctccagggtgacacggtgtgcctgtgacatgaagcgccaaggggaacccaatgtcatttctggggttcttcctgccccaaacagtccatttggttaaactcacgagagtgtgtgcttgtcgatgtagctgattctgtatgggtggggatttggaccagcccttcactactcaaagtggggtctgtacaccagcagcagggttacctccttaaccccgagcttgtaagaaagcacagccaagcatggtggctcatgtttgtaatcctagcactttgggaggctgaggtgggtggatcatctgaggtcaggagtttgagaccagcctggccaacatgatgaaaccccgtttctactaaaaatacaaaaattagccaggcgtggtgatgggtgcctgtaatcccagctacgtgggaggctgaggcaggagaatcacttgaacccagaaggtgcaggttgcagtgagctgagatcgtgccactgcactccagcctgggcgacaagagcgaaactctgtctcaaaaaaaaaaaaaaaaaagaaagaaagaaagaaagaaattaagagtctcgggccctgccccagacctagaatcaggacctgcatgttaacaaaccccacatctgtgatccctgtccacagtaaaggctgagaatgcttaatccaaaacaccttccgcctcccagagcttgtggctttgatgccatttgtctgaacatcacaaggaaccacgtgggaaaacaggacttcgtggcgtgccctggcagacaagccaaagcaactgtgggcatcaggctgtgggggtgagtgaggcccactatcttgggcactgggcggtcccccagaaaagatggaggggctggtgtctgggcctggcacagggcgggatgtcccctcatctggcctgcagcccctccccggtcccgagctgctgagtttacagcccagggcgcatgtgtgcctcttgcccagccaggaggtcagcagactgggcggtgatgaacaagtgccagcaaagggccccgtgctccgagcatgttagcgggaggaggacacagtggccacttgatattttccaatacggggttcaggcgggtcggcccacgggctggcagaggctctccgtgtccttgccaagtgactcattccagatgggaacatttattcgagggaatgtatgacaactcagctgtgacaaataaaaagggggtgtctgtgtctttgtgcccggctggtgcctcatctcccctcaaattgctgccgcagtccgtgttactgaatcaaggacttggtgagcctggtgtccgttcaaaggatggtcttccaaatgtccgttcccacatggggagacttccatgttaacaataggttattgtagtgcggctggcccggaggactggggactgtgaaaataaattaagagtgggccggtcggagctgcaacagtcatcgtgggcagctcttgggcttgccagaaattatttggcgctgcggtttacgcatctattagtccaattgcccaacagcttcagactgggttgggattttttttttttttttgaaagatgaaagatttgggggctgtttgaacatctgctctggtatcacttgggaagtttaaagtcagacgagttcgtatgatcagcgagtgggatgttttcttccctgtgtagggattaaaaacaaaatagtgagaaaacgcagtttttttcgttgtcccatagtatgggctccgtgggctagggccgggtcggaagcagctctggtggaagagaagcctttgcaaaatgtgcttccaccctggaaagcgtcgggggccgcgggctccagcgggtcactctgcccgccccgggtgccgcccgccacagctggactcttgtttctccagcgcctctggcctccctgcctgtctccggggacggggactgagctggcggcggcagatgagtgttctgcggtgtcactgagaactctggctcatgcacgaggccagctggaggcgagtgccggggtctgtttgagacagatggctctgtcagatctggctcctggaaactgtgcaagacgtgcaccacttggtggggcttggaggcctgagctcccagggtggcctttcgggctgacgcatggggccggagcaagctggggagtgggggacttgctgcctgcccatccccctgcaccagccaccccagggttttgtgggacctcatgggagacctcaaagtgaaacagccgtgcatgtccctacggtgactgacaaggcagtaatgatccacccacacccccgcctctggcttcatctcctccacgcacccgctctgttctgcccctgctggccttcttgctgttccttgattgcaccagccacgccgctgcctcagggcctttgtacccgctgccccctctgcctggaatgctttcctcctgatttccacacggctcctccctcgcttccttcggcctttccatattggtcactttctctgtggggtctttcctgaccaccctttctaaaactccagccccagacttgacagtcctgaccacaccccccgatgccattttcctccttggcatgtgttaccagcactggctggtgagttacttactgaccttgtacctcttgtctcctgccctcacccctgctgaagcctaaaggagccgcaggagctccatggctggtctgttttgttcacagcggcatccctaggactcagaataatgcctgcgcacagtaggcacggaagtatttgtggaaggaagaaatggagatcatcatgaaataagcgctattggccgggcacggtggctcacgcctgtaatcccagcacttcgggaggccgaggtaggcggatcacctgaggttaggagttcgagaccagcctggccaacatgatgaaaccttatctctactaaaaatataaaaattagcttgatgtggtggcgtgcacctgtaatcccagctactcgggaggctgaggcaggagagtcgtttgaccccgggaggcggaggttgcagtgagctgagatcacgccattgcactccagcctgggtgacagagcaagaatctgacccaaaaaaaaagaaaagaaaagaaataagtactctcagcccccctacgcactttgacatttaaaaaataattagagaggcactgaccctgaagtcactctggggtgccagagctggaggaactcgtaggacaatacagccaacctgggcagatgggcaaagagacccagggcatagaagccacctgcccagggcggtgcagttaattggaagcagagctgcctcttagcctgggctgacccatgggggcactggggaggtggaatgtgacaacctgttgagagcccgctgtgtgtggcagtgccatgcccagctggggtcagaaaagtttcaaagaagcctctgatctgaaggagcctcccttctgtggggagacacccctgccactgaggacagcagaggtcaggatgcagtctattctgtcctgggggctggggtgcatagaggaagaagcaaaactcacatggggtccaggcaggcttcctgggagaggcggcatttgtgctgggtcattggaatctgggggtggggggcatttcagccccagcaaatcttggaggtggggagggtggagctgtcagcatctgcaggaggcacccaccctgagagagagggagtgggggtaaaattcagtcccctctttgccaactgagacaggaggcccagcctgggctctatgggcctgagaaatggtgtgcctagcactaggacactgcagggaggggaggtcagcgagaaaacaatggtgtcaggctctcctgagcctcggccaccttcctcacctccacctgccaggtctgtggggcagcagctctcaccacctacctctgaatgatcagatcctgggctcaaggttcattttatcttcaaataatctttggcacagccctgagtttccggcagggtgtcaccttgaccccttctgcttgcaaagctcatatacaaacaggcatgacctgctacatgggagggtccctggagtcctccctgcagtcccagaggctcttgtgagttcatcctcccgccattggcctcccctccaatgctggggttttttcccaggcccgagaggctggctttgtcagtgaaagaagcagctgccccacaaggactcacctgtactgtggccacccgtgtccagctcagctcccctgcccctgacacactcgtgtccaggccttgcttcgtgtcccctaagtgacacatatgtggtgccaggcctctcaaaccaatgtgtgtgaaccctctgggagccttgtggaaatgccgtttcccattctgcaggtctgggatgaggcctaggactctgcattctcactggctcccagggaaggccaatgtgc

SEQ ID NO: 323 - DNA, 147023 bp, Homo sapiens
  source 1..147023: mol_type = genomic DNA
gtctctggtgggaaggaaagctactcaaactctcccagtgaaacagaacatgattgtggggctgccaccagagctatttcagtaagctcatatttttataaccaaaaccacttccaacaaaaaagaagtccaggagttaatttttgttttaagacttttaagtgtaaagctaatactaattgagaaatctatttagcaaatatttgcgggggaaactaccacaccattttttactgttgttgttgttgttgaaatgtttcccactcctcaccccctcaaaaaaagggggtgtgggtgtggggacagaacagaggaaaggagaaaagtggcttcagctcagtggaacactaaaaaatgcacatgaatcaattatgaaaaagagaaggtccctttgaatgacgaaaagctgattggaattaagataggctttgttcctatctggaaggtacaaggaggggacttttcagcggaacagaaaagggggatttgggactgtttggctgcttaatgccatagtgcttcagagcccatgtgaaaatttgctgctggctattaatcatcattgtgcccctgcaaagaagctgttacaatgatgactatatgtcattatattcccactgtaagtaacgaatcagagagctgggaaagttggataagagcggctggcaaacttttaagcggtcgaatctatttaaataaatttacatcacatttgctactttctctggtatgggaatcatactttaaaatgaaacaatatgctgtgttcatggggcctggtcttttattcccctgtctctgagcctactttccaggtcagcctttgccggcgctgacagcacgcttttctcatagcctctccttctcatagcctttggttgctttcaagttcaatttagcacaataaagttgttatgcatgacagtttggagagcagaataggtggtgtctgagcccgctgtgtcgctacaaagtgggcccattctctgtgggccggctcagttactggagccttactggtgggatacagccatggacttccagacgttcccatcctgacgaaaacaattagcttcaaactgcacgaagccgcggggtcagcctctctttgactgagactgcgccatttaatatgctgcagtggatttcaaatttatgttgatttatcctgttgtgttcctcttttatgcactttatttacagatgtgtaaagaacagggaaagttagagtaccccatgcttcaagagttttattcgaaatctaaaccattgttttatgtttattttatcaagaaatagagttgaaacatgtcaggcttaattccattaggctgaactgcccagaacagagccctggggtttggaagacagaatctgaaaggaagtgtctccttagctaagcatcatcaagaagccaaacaacaaacaacctcaaaacaccactgttgtcagggtagttttctattgtgggagactatccctccaaaatcccactctgacctaaaagtgacagatcttttaataaaaccaaaccgtaatttttcaaccattacaagccaccatgtatatctgtgtatgtgcatacggctgtatcagatcaattagtgtttagtattcattgacgtccacccaagtgcttactgtctttagaaatatgatacaaaattctgctgccagaaaacaaatattattcgattttgatgctgcagaattgtcctcatgcagagaatgtaacatcttctcttgtcctctgaagagaatcctgtaacaaagcaaatttaggtgtactttcaattttaccatcagagtagtccacgccagatgtcttcagtctcttaggtctcctggtaaaataaatcacagttgtcttgattactgatctcactaattatagggtacaatcgtcaaataagcccccttctagattataaattaactgaaagcatatcttaaaagcatatttcactttcctaaaagagtttattatctttctgttagctatttgtattaaatatctttttaaccaaccctgccacataatatttgctttaactgtgtaatagtacagaatagtaaaaaaaataaaaattataacatggagagaatttccctgcaataattttatcttataaaatttaatatacttgcaaaatatttttatccaaattacatcattaaaaggagaaatctatatctagtttcagcaaagtttcagaagggaagtcatttgtttgccttggtcatctctctccttctgttattatatgaatattatttggtgacatttttagtaaggcattttttaaagtcctcattttaaatggttcctgaaaatacagctggacaaagaaaaattgcattatgagagactgtaaatgtgtctgtgacaaaagcactatatcctttctacttttcagaggggataatttctttgccattcaaatgagtgaatactccaaaaattgaccaagctatttaactgataatatgcacttaaacagtcttttatttttcttgaagaaatatatcagaagcataccaaaaatttctccatgcaaaagtcatgcaaacagaggatggtgagctgttagtctggagggtacacctggaagtttatacacacatggacacacacacacacacacacacacacacacacacagcacatgtgcagaaggcctgtatggtacaggctataaaacttagcatatatctcttcatctggaatctccagtagaaatacagggtaacttaccataagagtttgtttcctcatctccaaagcaatttcctagaaaaaaaattgttaaattaatgaaaagatataaaagagttttggaagaaagcttgacagattatataacatatcataaggattttacagaacatttagagagaccctgaattttggactgacagatttatattcatactccctgaggaaaaaaaatacagaagaaacaattgtgaattggtagatcactgttactcattagtggagctacttttattaaactgatgtgaaaatgtctgatatgggagaagtttgatatggaagatgatagatcttcaatgttctctaggagcaaaggaaagaggaagagaaagaaaggcaaaatggaagctcattccagggagtgaatttgaagtgaggcaatataaaggtgaaagagagagaaggtactattcatcataaatggcatcaacaatgttagctaaattttaccaaggtcttttaagtcctttggctgaaacaggtattcaggacagtataggctttaggagaatatggtatttggtttaacttgcagcattaccatttacttgctttatggcctcaggtaaaaatttaaagatccagaagcttctctttgcccatcagtagaatggagtaataataatttcaaaatatatagggttgttgcagaggaaaaacaacataggtaaagtgccagacacaataactggaatgtatcctttaaatattaatttcctttaccttctcaatattttcatatacctcttgcaattctcatcctcaaatttctctgttggtcaaaattgagtcaaatctcctgacataaaatctcttagaaaaagagacattcttagtaacaaaccttactataatggattccagatggtttagacctgacaaaaactatgaccacataactagtttttattttgttgtggttagcctttgctcatgctagcctgatcactgaagaaaactaatgaagacctgaagaaaggttgctcatattgtggcaacagtatcttcccttatgtagacatgagtctaaagagacattttcataactacacaataatctccacaaaaagtctcccaggggcttagttggaaatctggtatgtcaaaagtaaagagaactttgacattataaaaaaaaagaattctgcttagcagttagtcctgatgccccaaaatagtatgctttggaggaataacgcttacttggtcatgaaaaaatgagtgaattcactgacataacactcatttatttattaaagacaagtcctcagaggtagagaatcatgtttcccaagtaataagcttattcttgtgaaacagtcatggaaccatggataagtgtgatagtgggggttgacctcttcttatttggtgattgaactttgcttcaccaatcttacacttgaaagtatttggcaaaactcaactcagggcaaacattcagaatgtgttctacctctacttattatatagcatatattttccagctactagcaatgatcttgaccaggtgattggtcaaaattattttttctagtatacagccacttaattgaattcttacattaatgataaccttattttagacagtgaaatgtattttacagaattacatagctaatgtaattaaatattgtatcagcctgcagaaaaagactcaactctatgttggaaacgctacatagaatggaagcatgatgaacattttttaccacatacagtacacagtcatattggtccttttatccaaagtctgttacttttaatgtcagttgattacatttcttaatgaaatgctttcagcgtacttaaaatatgcaaaatatgaaaaagccttctgacttgacttttaaacccatctttctttgcaactactggtagaaaaccaagaagagattagctgtattctatttctgcctgtttccccgtatttaaactatcataggacatactttcttatatcttatcatcagttaggtgatttttttcaagacctgtaaatactgaattaaacatatgcatgttaaatcagtcatttgtgcaacacagtatctttaaacttttttttgtttttatgggcaagctgttaataaagagacatatgtgctgtgttttatatatccacatactttactaccatttttttagataagcatcataacttaagttgtcttccacacaaagttctggcaagcttcaatagattcattagtgggtttttctttacaaccaacgaagctcaaagagctcctaacaatggagctaatcactgcctcttccctgacccaagcttaggttttccctcctttcacttcagactcttatttcatttctgagcaattggatttccgtggcactcccagaacaaataaatatctcctttttccccccgcttacatcttttgtgtatattttttctatacgactgcccgtatttaaactagtatggtaatggctgggttcttcaggtaatctttcattggacataaatggtgtagcattaaaatgcagataatgttacctcaattagagaatgctgtgcaaaacttgaaaaagacgtagctaaatgtttggactaaacaagtaagtctatgttgttaagagtggggctgagcaagttgcattttcaatagatcctttaatgaataaatgttagactgtatcaacagtcttgaacaggcttgtggtttgtgtgtgcatgaagtgtaatggtatcaattgactggctctttgtggttgctataaagtactcttgaatgtgtcaatggagagaaggcctgcagacaatgaagccatgacagctgaatgtcagcagtgaccttgaacctaaactggtttcaccattccagtgactccagctacagtgaagacatgcactggagccggaccttcggcattgcctgtcattttctgtgttcagattccaagcacttaagtgacaatttcaccacattgctagaccctgctaatatgcatcagtgaacgttcacttattagtgatggggctaaagatatgttcagcattttaatcagacttgcattggcatttaaaaatacaaaacacaaagcaaaacaaggcatcattctagacttaatgttttatgtaagcaaactcatccaaagaagatacccaaaacatgtcttttctgcagcactgaattctttgatatcgatcttgcattgcataacattactgcacatacattactacactctttattgctgcaaatagcacatgattagttaattaaaatatggcatcaaggaataattaatatttgtaatgcagtgtttctttaatgaaaaacaagagaattcttctaaaggtcacatttacagattaaatgtgtctttaacataaatggaatgttattaagctaggctcaatattcaggagagaactgcaaagccttttgtggcaaaacactattaatgaattcaggaaactgaatccctttgctaatgctggagttgagcaaggttagaagcccaaccacaactgaatgttcttaatatgttcaatgtactctgcagtgaagaactgagggcagggaaagaagggaattgggtggaggggggaaataagaaaacagaaaagaaaaggaagatagagaaaagcagagagagaaagagagatatagtaaaaagagaaaagaattttgttgatgagaaacatctaactatggtcatgcagaaaagagcaggaatactgaatattggcatgcaggtattgtaggaagaattgttttggtgttaaaatgttattaaaattataacactgtaagctgattacaattcattctaagaaaaatgtaacattttcttaaaaatgagcaatataaagaaaaataataatttcacaattatgaaatttataaatgcaaatttgttattataatgtcattgtggattgatatgaggtatgatatagacgcttcatttaactaacacatctgtgagtcctaatcattaataaaaactattgtgtgatatattattttttgaagtaaataaaagttggacactaccatcctcttgtttctcagtggttatctcaagttcttatataataaatagttaactatctgattacatttgttcttataagtcctttaaaacatacagaggagaaaaaaatgtttgaagcgtatatctgtgctttttaattgaaatagctgaatgctggcaaagatttttccatacatttctaaaaagataaggtcacatattttaaaacataggaaagtttcttaaatataaacatgctactcagagaaatgcttattgtccagaaaatactggacataaaatttactatttatttagtataataattactctaagtgtattttatcagactatgcggtactatagaaataaagatatattaccatgattccacattttatttaaaataattattatgtgaaaatcatgttaaaaagattattaaactaccaaaaaaaaacctagtgaacactaaaacagatattccaataatgacctaacattattaactttcttagggaaaaaaatagacaaaattaaatttagcttataatgaggttctttgaggccttaaaatcaaagtgcaatgaggaaaataaatagtgaaataaaaatattttcttgcatgaatttttatgtctgtgtttcatagaaaaccctttgattaatagagtcaaagataattctttctgatctttatagatgcatttgcaaatttgaacattcaatgtatactttttacataagcattatcacttataagagggctgatagcatcagttggcagctataaaaattattttcctcatatgtttatttttagtttaaggtgaccccataatgttataatttttctaatccacaggttttataccagaaaaaaaattagcatcacccagttttattttgaatcactgagatttatgtgaattatatttactagaaaaatatcatttagaaacttttcatatttatattggaacttaaaatgtatatagaggcatagtttttatgaataccagagaataaaagacctctacagatgccaccattcattatgaagtggcatctctgcaaactcctgttggtatcatactttaaatggcctcttcactctgctatatggaagaacttccaaggagacaagctccaaatcttgaaaaagttgatggttggaatgaacaactatttttctgttacagttattcttaagtaggatggtaattctcaattaatctcctgtgcatatacgggttatggaatttaagtttaaatacaaaagtagtcagaaatgaaattcaggttaacaggtcaacacaatgcctacagctcagctacacatttttgttggcctacttcagcaatcttgattaaatctaacataggtggtaatgtctggaaatacattcttcttcacgaaatagttaaagagtatacttagtaaacacctggctatgtcttttaagaaaatattctgaataaatgcttttgttaattaagaaatgagagatcattctatgaataaatgtctgactatgatagaatttgtggtggaaaaagttgtgcaagaagcatgtattgatatgggtttgttcttgtactttaaggtacattccatgaagatctatgccaagtagttcttcttcaacacttatgaacctgtatgttcatattgatctatcgtttcagagtatccttcactcttaaaatcccttaaactttttatgtaaaaaaataataataaaagggtgggggtgaactcagaattacttattttcaaatttcagtgacttatatattaaatttatttatgtattcatttatttgtgtattcattcagcaaatatgtatttagtttattacgtgcaaggttctatgttaaaaagaaaaaatacgaatggatttctgtgttatctttcattctttttgtctgtttttaagcacctagtttttccaaatcttgtctaagttgcagctatcaggaaagactcaaaccagtttcacgtgatttggctaaatgtggaaccttgatcacagaaccaagcagaagcccaacagagggccttgtcacttttcacagatgatgaaggggctctgtgcgcctgcccccatgcacctctcagggaaaacaacagttcttagagaaccactcagctcttaatctgtcctggactctatctacacattgaaatttagatacagtcactaatctggggaatctctcatttttcagacacagtactagcaaatttgtcatatgatattttatgtaatctttagagtctccgtgtaaggaagaaatatctgagatgcaataagatgaggtgattaactccatgtaaggagaagctgtaattctatttcagatctctttattccatagccagccctctcagggatcccacatgtgtagtagtatcgatactgagtaaaaatgttagtcaaactagaaattgcctgaaaagatttttttaacctgtatgtagacacctactgaaaagagagtaagcaaagatacacagatccagtacctataagcgtgggctcagactgaaagaattctgacaccctccaccttcagtcaattttccctccaagaaaactatgcttttcatcactgccataatagtgaagaccaggaatgattcttggtgggattgtgcctctaattttaccaaagcttgaggttatgatgctgtagcagacactgggttgctacttggcccagccatggttccattcctatatatgttccctttccctctatataccagtcctacactactagagaccacggggtaggtgagagaaatgaaacaagttcattctccttagagccctgatcaacaatgtcttctctctcaaaaaaataaagaacaactcaaaagcaatttatcctgtgcccaaatagtcaatattattagattttcaatttttttagtcacatttaaatttttctgtcattacctaacaaaatttttcaacacttaaagaaaagttcattctttgtattgtagctaatgttttacataatatcaaataattttaaaggaaaatttaattaaattcagggtgaatacttcctaatctaaataaaagtatatttttatttttattcactgaagttataaatatgaacaaattaacattaaactttataaaacataaatgttttttaaaataatattctataacccaaaataggtaccgtcaattaaatgcatgtgatattaatattcatagctctatctgctctcacctaaactgcacattcaatccagcaatatattttcaaacagaaaatttacttgcattcattttgtcagaagaatatatgtcatatttacatgtgttccaatacaattaatgttttcatcaaattttgctttgggaatttttcttctcatatgaacttattttactctcctcaatcatactgttgttttaaaatgatccagataaacatgtatatttttacagtgttatactcaagatacaagttattccagaggtaaagattctcttgtaaatattctagcttcatgttttgtcctgctagtacataattgacattcactaacattggttggacagttttagaaacgaatgttatagtgtagtcacattaatgctgaagtaattactaataaaatcctaaaaaggagttctgttgttcagaacgaaaaatgcagtttcattttacttgttatcacaaagttatattaatactattgtatagctaagcacatttggagacaccatgcaaatctacctgtcatgtttaattataaactactgaggacactgccagtaaaattaacaaataaatatagcaatattcagtatttaactgctcttgttctaaaagcatggaaattgtcacttataaataccaagtgtcatttaaataattaatcaatgaattcattgtaacaaattatctgagaagtgtttgtgatgaggtcagctccctacgacatgaccccatattttaagatgtagtcatgtactcaaaatggtgacatccatgatttcagagtactgagaagaatgtagactaggaaatatgaaatacttctaagtatttcagggccactgttgtttggatatgtatatgccatggaccaaataatgtcacacaaacattgtaaccacaaagagcaaaaaagtcagtggaactctagaatataacactgatttggtggtatcttcagataccaacagaataaaagggattcacttctatcatactgaaaacactggttttctttaggctatataaagaaaaaaaaaagaagaaggactcattcatattaggccaatgtaaattcaagtaatatcccttaaaaattaagggataatacagaagttatatctgagatgtggagtcttgccttgtatgaaatgataagctttacttatacagtacaaaacctagtttataatgtttttcttcatcatcataatgtgactataggtgtaaatttaccttgggttaatgcagtttatataaaacgacttggctttcagctatttctgtagtatagtttattttcagtgcctttctcattaaaaaagtattacatttagtaattaggccacattatgcttgggtatatatcttttcatatgtctacaggaagaaatttctggaaagtttctatctgaaataaaacctagctgtccatattcctatgtattccagcataggcaaggatctcctcactgagcttacctctaaactgagtgagaatttgtaaaaatcatatatttcaatcccagtacaggtgttgtacattcctctcttcatagcctaccataattagcctgtcttctttcaacatagagctaaagtttaagagccacagatacattatgaacctttcttgggtaggccttacacacacaaagtatagaatagaaagtacattatcccattaaagtgttcttgtttcctttggaataatatcatttagaatgcaccttagcatattaagtggttgacagatagcataaacaaaaataggttttacattgcagctgtacacaatacacctttgtacagttgactgattgcttacaacaataaaaaataatggtagcattctgctgtcaaactttctgggtagtttatagcgaacttcaaaaatatggttccttttctgcaaatgcaattaatttgaagataaaagtaatgtggtgccatgaaacataaatgtttcaccccaaagaagagattgttatcccataacaatagataaagtttcacatcccaatttttcgaaagaaagcaatagtaccacttaagtatgcaaggaaatgctttatgtggcgacgagtacaatattattaatataaaaaagagaaaagtatttatttaccaattttgactgttgtcatggacatcactgtttcaaatggcatttttgacaaaacaatttgctggctaatagttgcaggagaactgaaagattttttttttccctgtgtatttacaatataaaaaatgcatcctcaatgtaacttttctgcttaagaggaaaaagaatgagttctgtaaaacaacccttccagtgcagtttctataagaacaaatgaatgcaagtgttcacgaggcctaatcttcccttttgtatttgtttcttcattaagctctaactatgctctagctcttgtaccctgaagatttgatgtgaagatggtatgacaggcttggcttctcccgatgcagctggcactcctgatgccaaaagccagagcttgtggtagtgggatcaggagagagtcgttcccagcacagtttgcctgtcagtttcccatgcgcctcgcagtgcagcgctccctccccaagtccccttaatgagaagtggaggacaataccagtattgttgtttctactcacaatcttgtggaaagaacaatcgctgtttacccaagcatttgtattacccaaactctgccgataattacttctagagtccctgattaactctgctctctgcctcagcacaaaaaagctattgagatagacaccagacaacttttctatctcttagagccttttaacagtttactgaatatgactcagtcctcatacttattagaagaaatgtacctacgtgatttgcactcagctcatcggagcttgctaaccatataagtcgcacaggtgtactttggaaggcttaaaaattccccatcaccctcccttctcccctgtctctcaaaaaagttaaaaagctctgtctcctttcagttgctgtgtccctgtacctaggagtctatgataaatgcaagcacatttcaagtaacaatgatatttctagtcagttttttgctgttaactttttatagtaaaatatgtaggagaaaaatttctagttatttaattactatgagattttatgatatgcttttgttttctaagacctaacaaaatggaactgttgctatgtctatttcaatgatattggtaataattttaatctgtcacatcacttccaccccccttcacgtcccacctcacatgcagtctgctgttagcactatgcaaaacaccatcatgaatatgcgtaattatggagattcatggtaatttttcagggttatccgatgtgacgtttataggacagcagcatacatcaatttaaatgagtgtgacaaatatcttatcctttatatttctatagtatttttaatattttcttggcccctctccagggagtagtgtgaaatggtaagaacttgaataataaaaatgttaaacaatcaaatgcttcactacaatgttttttaaaggcaagtttaaaaatgattctctacctgttgaagcttaaaaagtatcatatactgaattttttcttaggcagtactttttattgagcatcttacacatttccaaaccaacaaaagcatggacatttgcaggtgccattttacgatgaggctgaattgcttaattacttttaaactatgaccgcttgcctgacaaaattatttggcaaacatggtccaccaactttattaagcataagcatttgaaacaataatctaattgtggtatttttgaattttgttcttagtctgtagcacctcttagagacttgcatataatctttatctcagtgactaattaggactagcttgacaatttcatatttacaatgattaccaagtaggaatcctcttccttgttcagtatgtttgtcatgaatactgtacaatcctaattacattgaagatataaagagccccataatttgattgagagacatcttgagtttaaagtgagtaaatgtgaattgtatcgagaattttaaatggcagagcaattaatacctatttctcatgcagtcactaaaaagacgaaataactgtgtgcatgcaagtcattgtatcagccatatttttaagggtgttaacaataaagtcattaaaaactggcttgattgaaaatgatcttcctcattccaaccaactgaattcagaattcctttttctctagcatatactttcaggatttcgggctgagggtcaaaccttcgcaattaaatgttcctcagtactatattggcaacacaccatcgtgaatactcttcatacaattagcagggcctactgtggaagtatactgctgatagaaataataatgaggaatactggggcattagtatgccagagtaggttggagaaacctagtttgcatgatgcatgtataattgtatgttacatctaaatatcactgtatgttgctttagaaataattgcttagaaaaatatatttaacacttcctctcttttaaggtcccaatttgattaataaacaagttcagtggtatattaagcctataagttagcgatgtctcaatgaatgtgttctgcatttgcatgtttcttaaagtgacactttctgaagacacacgattgccatgtctatatacatgtataaagagaagtgaagaattgatgcaatcatccagataattcaagggaaaaacacttttgcctcaattatctattgcaagcaaaagtgaggggtttatcctgaattgttcaaataattgccttgattctcttcactttgcatgtgtagacacattttacaataatatttatgttaacatttgcaatttacatacatataaggcagaaatacttctatacacaagatgaccaaaatcttttcacaataatttctactgtttggttgtccctaatttttggtacagtcagatcatttgtgtgcatgttcttatatggtaattgaatcaaggcaaaactagacagactcattatgttcatttattaaatgcttggttaataaactgattggtatatacaatactgatatctcaccattaaaaaattcattgatatattctatctaaaacttcaataatatatacttcttactgggtatatcataaattcatttgaggaagtaaatgtgattcatatgtatatttataataaaatgcaacattaaaacaaagacaaatttccaagaaatatatcttatattttacatatttaagatttgttatgaataagttaatattcataaagaaatcaataccagaacacattttcaaaagttccattgacacattaaaaattcaaatacatagcagattttatagtgtttcctccatctgcactgacaggaacaataatatgtttaattactgacatttgtattatttttaccttacgtttattaaatatataaagtatattttccatgacttttaaaatctatactgtttattaatacatgaggaatcctaaatttcttctgggcctgcttaatcactatttgaagtctttattctggtccacatcaaaaatgcattttagaaaatgtaaagcagctctatcatgcttcttcatattggtagcatgtcaaaatatgttttgtttgaactttagaaattaaatcttggtttagttaaaatattgccaaagtattggattataagtgtttgtctggacaaacaattaatacctaaatgttgaaagacaccagaatactttatggacctatttggcaatggaaatgaactatctatgttataaatttagtagatagggctcatatgtagcattcatttataattttcatgttttatataaaagtacgtaatggatgcttacagtacaaccaaaatcttctctgtgctcataaaaacacataaagcagatgcaaaattaagcattttggagtattttaccgctccaatattgttttaatttgttctaaaaatcaagtgtctgtctctgaattttatttatgaaaaatcaacttccagaattaaatgaatacattttataaacactgcaagcatgggggcttgatagatatttttcttcaaaattgttaaagagcaaaatataataatttggtggcaaacatctgtctggcaatcatatatgataaattcataagaaatacaggaaagatatttatttactgttactgctaagccagactttatttatcttagaagatttttcatctatgagtggaaaacaaactttccttcaagaggtctgtgaaccgaataataaatgtcaggtctaaatcctgtatgaaaatcagtccggtttaatcctggatattcttcagcatgcaaatgaagactagaggtttccctgggcccgctgtcatacaggcagccaatttacagaccctggcactgtgtatgtgttatgggctcgctggctgcccctcccccgcagcctaagacttggtctcagctgcctgcctttcacagaaaaccacaaaccaaggaaacatatcagtaatagcgccctgtaaattaacttgacatttgatgcagaaaaaaacctaaaagcttacaaaagacattgaaaacaaaagccactcaggacccacactacatatattgtggatttaagagatctggaaggtggttattctattgtaactaacacatacagccttcatcttctttgttaagacaattcagtcattctttgttacaggcatagtatccgtcaaacaagaaaacaatattttccaccaaaaaaaacccctaaaagtccaactgatattataataataattcaatcaataggtttttttacattttaaaaatagccatacattactaatgtttaaagaaaagaagctaaaatatgattttatgtttccttggtaaataagacatgttgacattgctaagatgtaaataatgtaagatgcattggagaatggtgtgaatcttgctgaacatgaggtattcacaaatattgttttgtcttaaaattttgcctttcaaggcatttaatttttttcatgctaggaaacccctgaatctcttttaaaagaaaaaaaatttttttggttcaaagaaggactgttgataaaatattaaatggttctttgacatcatctgtggtgtggggctggagtgaggcactcagcatatttaagccattagacatgcaggaatgttaacattattatgcgttattgtgtctggctatgtgtccccctccttattctcaatctctctctctctgcctctcactcattttccctcccttcttccctccgccccacctttctcagagtctctcctacctctcccgccctcagcagggcctgctacacggcatcttacaaatgtctggtcttatagtttacaagcacagaactgtactggtaaaaatgcataatctcagcatctgtgcttcttgatattcatggatttatttacaagtccctgtgttctactttttttttgcctgtttctatggtttatattactgtcatgcctatattcttgtgggagtttcaaataagaatcaagatataactggcaaatattctgtaatgcagactgcatttccataatttagctgttttttaaaagagacaatttaaagaggtttatggacttaaggatatatgaagagtattttgattggcttttttagtacttcaactgcttaaggttccgtttgtgcaaaatggatgtaataaaataaatttatgaacatatatgtgcttgtgtatatgtaaatgcatttagaatgaaaaagttcataaatctaagtcaaatttgctgattaagttcactatattcacatttggcaacattaggatatttcacgaaagggttcaaaggtaaaaggcaaatattttatttcttctttagatgctagcctgcaaaaaacttaaatatttacaaagcaagtattcaagttcctgtgttcccccagccctcaacatacatacccctcccattcttggtgctagtttaacagcagccttttagtagccattgccagtgccaaataagtctctttttcctttttttcaagctgtaaaaacagtcttttgaataatttaattaacagcaaaatcagaaatttaacttactttacaataattctctaaccatttcccatctacccactccccttccccgcatagaattctaccttcatattatcaatgcacttatttttagggattaatattcactagtttaatgtaacattgaaatcagagaagtctatgtacatttgctgtttatagctccagtttaattactatgtgttaagtcggctagacactgaaatgaattttatgaatatctttcaagacagcaatattttggacctgcatatgagagaaaatacgatggcaggggacaatacattaaatgatctttatgccagtattcttgaaaattcacgttctatgtaggaaaatgttaaatatgagaacattacgataaaggcttgttatagtcctaaagtgtgggatatataaaatacccagatttgcacatgtatagttgcaacacatgctaagcagtacagattattaagcaagattcattcctttattggagagggaggggagtaatttacagacaagagctaagcaattctgtttaacacaactctgtctagttgatcgtaaggcatgtgtggtatttttccaaagcccgtcatcaatagtaaagcaatttacagctccagaaattttttagaagatactcattttattaagagtaagtaagataggttgtgtggaaagatacacatgtatttgcaattcatatcgttgctgtgtttctattgtgttctgagcttccatcatggctgggagatgggaagctggcatgcagtgcaggagggtaagacagaaagccccaaataaatacttagagcattttctaattatctcttattatgaccacctttctttcccccgacccaccccgggtggaggggggcagtggggagtgatggaaagaagatgattgtaagtgcagatcatatccgtgccattaaataatattaataattcttttggtccacaggatgatgttttcattctggactttgaagctcctcagtctacccattcaaagcgatgacagaaaaatgaatctgaatgtgtaggcattaaacatttaaattctctactccctggtcattatattgactgtcatattttacaccttcccctcccccactatgcttttgctgatttgacctcatttacattggctcattatgcatccggtctttgttctactgaacagaatacagtacagtgacaaagcaaaacttacgtgtcggctggaatatttttctgttttaaaaattaagtttcactacttaaatttatatttgacttcccaatattgtttaaattggaggcaagtcttttcttatacaataactataatctacatgcaattattttaagagtggttaaaattacctcaaaatgtcattaggaaatgacatttaagaccttttataacaaatattctactgctacctaggcagtattatcatattagaagtattaggcttttctttccaaacctctgtctgaatttctatgtaggcccaaggagcaagcttttatctattttatatgaagttcattgtttagagctgtcccttatgggtcttgttttaatgtatcaaacaacaaaggtaatgtcaatccttaaaaaaaaaaaaaaaaaaaaattcctgctttgcatttcttgcaattaaaaaggttatctgatttacaaaccaaattttcattaaattaaaaggaagtcctagctgatcgatcacatagaaaaatatgaaagttacattgagctttaaatgtctatccccatgacagtgcacactatcttttcatttgttacaaccaatggagacatgggattaatctaatacagcctaattaaacacccattcacacatgaaggtttttaatggtaccagtggctagtggcacaaatgctactttgtatcacagttaatatttgcatttatttgacattggacaatagatatttttgaatacaaagaaaatgggaaaaataaaatattgtggaggatgcttttgaaaatacaagcaatttcttgtttccaccaagataattgccacatatacaatgtaggtttcatttcagatatttagaccaagatgcttttctaatttttgtcatttatcaaaatgtataatcatggtgacagtggctacatgtctagggcaccatcttggaagaaaaaagcatcatgtcttcttggttccgttagtgactcattgtgtgaattttggctggcgtctcctttaacctgcttgtgccttgattttttaacctataaaaagggaatattcgcccattacttacccctgttgggttactgtgaagtttaattagaataaaatattgctcctagaataaaagtatcttaaggatgaaagttttcgtttttttttcattaactttttactacatggtagggaatgcagtgttgtagatttgcctgtactcagccaatctctttttcttaagtttggaacttttgattctagagttaataaaaataaaatccaaatgcgtaattagattttttagagatgggagcagtcacccacatcttggcaatttacattatataatcttatatcagctgcaagatgcttttatgagtataactggttttagaaaatggcttctgcaggagaaatagtcaacacagtagcattcaaaatgacttcaagcttgcaggagagctagaaattaggcaaagaactcctaccccaatggaaccacaagggaaataaagtaaattaaagttttatatctgtagttactttgtaactatcttaaattttccgtagagtcctagaaattttagatattaagcaatatgtatctccaacgcagaaatctgtaagatggcatcatttgagcatttatctagacttacctaaaagacatcccaaactcaacaccatttccaaaatacaaactggacacaattaaccctattttcatacctagcgttagaatggtgttatttaatgtcttcacacttcaactgaatcatctgttatataatggagttgatgtagattatcaacgagacccttccaagatccaaaatgaacctagtcagtatttggacatcacatcctgagaattttaggcacctgcccaaatttaaatattgtattaattgttccatttttgtccctttatatgatgaatgttcactaaatattcagtatatatcaggcatttgttaaattcttgaaacctaaaaaaggagcaagttggaggcacagataaagacaacctcgctaaactctgactgggatcaaagtctataaggcatctaatgacttgacacacagatgtgctttaaaaatattaatgagcatgatagactgtattaatgttgactaatatcctgtgtctctcactacagaagggttatacctcctgccttcatgaagtcaggctagatacgtgaattgctttggctaacgaaatacgtaatagttgtcttgcaagagaaagcttcaagaatcagtccaggctgggcacggtggctcacacctctaatcccagcatattgggaggccgaggcgggtggttcacgaggtcaggagtttgagaccagcctggccaagatggcgaaaccccatctctactaaaaatacaaaaattagccggtcgtggtgacatgagcctgtagtcccagctattctggaggctgaggcagaagaatcacttgaacccaggaggtggaggttgcagtgagccaagatcatgtcactgcactgcagcctgggcaacagagagagactccatctcaaaaaaaaaaaaaaagaatcagtccatattcttccattctttcttttatttttgccacagtcaccatcaatgttctagagagtttctgctccaccaaattatgtcccagagtgagggctgtaatgacatggaacaaaatatccaacagatacataatggatactgaatgaaaaagaggaaggagaaaaaaaaaaaaaactttactgctaaagtcaccaggatttgaaaattaaatattatcatattataacttagcccagtgattttcagaatgtgttttggagaaccctggggttactgaagctttttcaagaggtctatgaggtcaaaattatttttgtaataatatgaagatgttatttccccttttgctctcgttctctcacaaatgcagtgtagagttttccaaaggctacatggtgtgtgatattgcaacagattgaatgcagaagttgatataagaatccagcggtaattttcactgaatgtttttgtcctcccaaatccgtatgctgaagccctaatccccagtgtgatggtatttggaaatggggcttttaggaggtaattaggtttagatgagatcataatggtggagcccctgtgatggggttagtgcccatataagaaaatgaagagaccagaatccactctctctcctccaagtgaagacatagccagaaagcagtcatctgtaaaccagggagagggccctcaccaagaaaccaaccatggtggcagcctgattttggacttccagcttccagaactgtgataaataaatgttgtttaagtcacccagtcatagcagtttggaagagcagcctgaactaactaagacaagcaggttaaggattggcaaaactgtataatggtgccattttcctcactaaatttttatttttttttgtaaaatttcgtattttatataaaaaagttatgttaacatataattgatttattatagtcattttcaattaatggatatttttaaatgttcttaattttaatttcaaatacaagaaaaaaatcaatgcatgtaaccaatatcaacaaaaactctttaggagtcctccataatttttaaagtaaagaaaccaaaaaccaaaagtttgggaattgacctatcctattctgactgacgcagtgagtttcacaaggagtagcttactggagctaattaagctctgtcatttgtggagctctctggatagaaaactataactttaaaagtagagttagaaccaatcatacgatttagttacttaacagaatgagatgggacttttcatgttatgtaacaaaagactggttgttgcctaatacaactgctataataattagtctagacccagtcaactgtctctttggtagagtttgactgagtgtattttcctctttattctgtaaaagagagtaaatgcaatttcttgaagtaagtgtgaacatacataagcgaaactgtaagtcaccctacacatgtacaatgtgtctaatttagagggaaaaggtaacaagagggaatagaagagggcttgtaagatgagaaagtttcaaatcacacttttgatatacagacacatcctgagtgcaacacaccatcccaaagcagaaaatctgaatttaaaatgtttgggcccattatctctcttccaggccagcaatttctatatcaatttactcttactggcatcgtggttcataaatgggttttccatcgtttcaattcttgatgtgcattccttcaactggatcataagctccttaagagtaacaatgataccttctattgaatttgcctctgtccatccccagtgactgcacctagtgctccacatgagactgggactccataaatgccagcagattaagtaaaacaagatagcatcttttaacttcagagctcttggcaggtcataaaataaataactggttagtgggggtaggtttactattcctgttaacttaaatatacctaacactataaaatcaatattctgtgaaatattaaatggtcattaaaggcaaaaataaacagaacacatctagcacatacatcccattgaagaactatttctctagccagcataattcctggatggactctgctctattccaactgcccttcagggaaattttcatttaaatatattcctcctttctataatatccagttgtagaaactcctaaagcagtttattatcttaaaatataagatatttcttctatagtttttgagtcacccgcttttgtagaaatccatgtagaatttgtggaaatttcctacttataagaaccaactaaaaaaaaattttatgaataagtgtttgtatataaaatttttatagaatttgctggtttatagacattatctatgctgtatacattatcccatctgaacttctcaactaacttgtaagataattattatgcttacccctattttaaagcaaaagcactgccaagttaagagatacatccaagaacatgtatctagtaatggaaagcaaattcaagtccagaatcaattccagagtcacgacgctttctaaactgttaagatatgaacctgatagaaaagtttatttttattcttctaataaagaatacagtattatttccctgaaatgatttccaaattgtattatacagacgaactaattgtttttccacagcttgagtgaatgagggcataggtgaatatttctagtgtaaatataggcaattggaatttttgcaggtattcctgaggaaaatcactctttctgaacttcaaaatgtttatttttcatttaattctttattgtgtcccttaattgaattttcctttataaaaaatccatttataaatttgaacaaagtctaagtgttaaataactcaagtagattgccttggaaataacctagagatacttcttcaaattaaagaaaaaaaggagtattatggtaacacttttcttgagatttctagtaggttggatggtagtgattgttaatacaatagttaatccatttgtattttcagcagctactataataaaaataattaatgagcctttcatttagattttctggtgattttttattactatactttaaattctgggatacgtgtgcaaaacgtgcaggtttgttacatagatatacatgtgacatggtggtttgctgcacccatcagcccctcatctatgttttaatcctctggtgaattattaactggaggttgtttctcataaaaattctcttaaaaatcagttgaaaacctctacccctaatctagaacgcagagttatttaaagttaaaaagcaaacattaagctctataccatgattaataaaagcaatggactaaaaattactattttttgcttggtttctaatagcaataatcataaaagcatatgtttccctccttctttaactacaaagtttgatacaaaaagttatgaacacttacactctttacaagagttcagaaagctagaacggtattagaaggcaaggataggcaggtgagatggaagcagcattccagaactgctattattcacccttttcctcgagaggtttgaaatcctacctcaagttattacacatgtgcaatgattgtcagggtactctaactcttatctggcagaaatatgtaaatcaaagaaagctgcggtccaaatgttattttcttagtatctcaaaattcatagtacaatatttccttgacatgacttcttcatttctttcaagtaatactttcccctggtccttccacgtgtttaggatggttgctcttgggcctttgcaagaagtctcttagtctagaaacctcctgcattaacctcttctcacatcctaaaagatgtcttatttctttgagtgacctctataatctcaaccacatttacatgtatatgaaaaccacaaagaaacctactagactcttgatagttctagatttatcattcatggttttccctcactagattaaagactccataaagacaaggatcttgtcttactgatgagatgctcaacatttgttgaatgaattaagcagatgacagatgatgaacataatggcttacaatgtgcagtctatgatgttgtcaggtatagatttgaatttagtagaggatgaggttggtctgtaggagagtcagcaaggtattgaattagcttaggaaacgacttgctgttcggagggtaaatagttttctgtggtggcattgggaatcttagaattcccacagccccttctccagctctagtgaaatttaagggcctaccttatacaatacttctttatggacacggcacagtgcagcagtgagggcagggactttatagccggattcagttcaagtctcagacttggcacttaccagctatatgaccctgggaatataaatatcactcactttccaaaatcgtgaggcttaaagaagatcttaacacaaatccaaacatagtaggtggtcaataattgttatttatttttattatcataaaatttctaagtgatctcctggacagtcaaactggacctctaatttaggataaatacattagttaatataagaataagacaatgtctgaagaagagttaattaggtttagaattcagtttagaagaaatgctttatattactggaagaaactggagctgttagagattacagtataaacatctataattgacagtcagctatgtggagattttaacactagtttttattaagcttctgcgctgtgagactcaacctcagtaaaagccatcaggaatcagacacatacatttcagcatgttgaaaagaagagatatcagttactgttggtgcctgtatagccatcataacttcaaagcggaacctgtttatttttattttgatagcatttaaataatccaaaacaaagaattatctacctgcagtttaaactagaattttgagaattttgtttgcttgcatttaaaaataggcacagaggttttcgtaagttgtagttcaattcttcttttcaagtttaatcatcatgggtggcagcatcctcagtacaaagtattttattgactttatcaatgagcagcattttgttgaaacaaattaatctttccatatttaaagggtcaaatcctagagtatgtcaagcatttgtaagaaatttaagtgagtctgccattcatagccatactgtgttttaaattcaatgcctacaaagataagctatggagaaatgacctttttttttttgagagggagtctcactctgtcactcaggctggagtgcagtggtctgatctcggctcattgcaacttctgcctcccaggttcaagcaattctcctgcctcagcctcccgagtagctggcactacaggtgtgcataccacacccagctaatttttgtatttttagtagagacggggtttcaccatgctggccaggctggtctcaaattcctgacctcaagtgatccacccatctcggcctcccaaagtgggtgggattacaggagtgagccaccacacctgaccaaattgaccttgccaaaatccattttttaactatttctatgagacagggagaaatatgaggacaatgtaaatatctctaagcatagttccatgaagtaccaagaacaagaagtagtaagtcttcttaagtgggaattatggagggaaagttctcagtcttaccagtgaactgataaccatgccctgtgggcactttctagttctgatctaatttatcttgcctgttgcatatcatattattgatctttcttctaattatctcctattccacagtaatattcttaaagtttacctcctacttgttcagctatttcttctcattttcatggattattctgccctaagttttcgtcctcaacctcttctctattctcaagttactccaagcagggtcaggggaccatctgcaacaaaacaacatctttaatgcttgttaaaattcagactcctaggcccatttccactctcctgagttaaaatctccaggtatgggagagacaaaattgttttctgtggtggcattgtgaacctgagaattctcaaaggcctcgttatatgttctctgtgaaatgcaggggtctattttatataatgcttgtatttgaggcaacatggtacaggacaaaggggagagactttacagccagattgcttgggttcatatttcagttttggtatttaatagctttgtgaccctaggaaaataaacagcacccgcttgctgagatggtgaggtttaaaagataacatatgtaaagggctttatgcaatgttacacatagtaggttccttttttaacaagcttcttggtgattctaatgcagaccaaagatagagaaccactgggtgatatcatccattgccaagatttcaaatcaaatccatgtttaggatgattattttaaactctccagtgacttcccattgtataagatcctacatcacctcatccttgcttttctttccagcctcctctcttgccttcctttctactaaaaacaagttgtacagaaatttttcagtattctgttttggctctcagcttccctactgactcttcattctttctgaaataactttcctctgtaggctcctttaccagactcatccagttcatcttgtaagtctcagcctagatgtcagagccctcccagatcaccaggtctaggtttggtgtctctcctatgaattctcatagcactctgatcctcccctagcattacatgtatcacattttattgcacttgcttagttatttgtttctatcccctataaggtatttccagttccatgttgtggcatttaatatatgcctcattaataggtgctttacttacgtaaattgataaatggatgaatgaacaactcacagagataggcttccagatcagacctcttccctaagccttcatatcaaactggacttgtgaaaaatgaaactccttatctttccccatcaaaatggttccttcccctctctgttcttttcagtaaaatacataaaaatttgcccaatttcgggcgaaggatgtgaacagacacttttcaaaagaagacatttatgcagccaacagacgcatgaaaaaatgctcatcatcactggccatcagagaaatgcaaatcaaaatcacaatgagatgccatctcacaccagttagaatggtgatcattaaaaagtcaggaaacaacaggtgctggagaggatgtggagaaataggaacacttacactgttggtgggactgtaaactagttcaaccattgtggaagacagtgtggcgattcctcagggatctagaactagaaataccatttgacccagccataccatttctgggtatatacccaaaggagtataaatcatgatgctataaagacacatgcacatgtatgtttattgtggcactattcacaatagcaaagacttggaaccaacccaaatgtccatcaatgatagactggattaagaaaatgtggcacatacacaccatggaatgctatgcagccataaaaaatcgtgagttcatgtcctttgtagggacatggatgaagctggaaaccatcattctgagcaaactatcgcaagaacagaaaaccaaacactgcatgttctcactcataggtgggaattgaacaatgagaacacttggacacagggtggggaacatcacacactggggcctgttgtgggtcggcagaagggggagggatagcattaggagatatacctaatgtaaatgacgagttaatgggtgcagcacaccaacatggcacatgtatacatatgtaacaaacctgcacattgtgcataggtaccctaaaacttgaagtatgataataaaaaaaattgcccaatttctaaagccagactgttgaggattatccaaagctgccctacctcccttatccccgtatccaatctgttatactgcacattagcaatagcctagctcaggagatttttccaaagtgtgattattgagatttgattcaagagggtattttgagtgtacatgtttaccttcccccttttctaaaaactcatctcattgaaaaagaagtacaaaagggaatatatttataactgttctgagaacaggaagaccagagagcctgatgacgttctgtaacatgagtagcaggtagaaactatcatattaataggcaaacaaaagtaggagcctccatttcaaacaaacataggaaaaagctctaacagaaagaaaagcactgttcctgaccatgaagccacagagagactccaaaggaacaggtacaaagattggggatggataaggaaggtgattgattgaaagactgtccacaggcagtgttacaaacctcagctgatcataagattaacatggggttcttgttaaacagagagaatctctgaacttatccctgaagactctcgttcagtgagtctggcaatataacccaggaagttggatttttagcaagagtcccatgtgatttttatggcaaacaagtttgggcaatattggaatatggacagctctttgttcaggaaccacattcctgccactcccacacagattgatgtggcatacagaattagcgtttgccccacattccatatttaaatcagataattaacttccaaagagatgttaaaatcatctgggataactaacagagatagtagcaccccaaaataaggctgtccacattctagcatttggaaatgccagatacttccccagctgagcatctgaaagtgagtcctgccagtctgtgcgcccaaccacacacagagagctctgctagtccctctactcaaggaaaagccttattagggcaaacagatagggagttagtcatgttaactccctagacaggcatacatgtaaataaaaacctaaactcaccaaacatttgaagaaaaaatgatagtatcaaagagagaaaaaaagcggaacaagtagaatctaacaaaccttaaaaaacaaaaagcagagatgtgatggatgctgagataaaccacacagatccctcttcagaaacaaatgatttattctccagttgctgggagagctgcccccagaaagccataagggattgcattggctgaagacagccacctcacccaagatcatactccttcctgatggctaccatatccagtgactgggaagcatggatatataaagtcctagcctccttatcccaatgtggagaaacactgaagagtcatccctgcaggatagttctctaggtggctgtggattggctctgttctcccctatttcttgcttaagaataactatagaatgtgctgggaatgcagcatcctgagatgggtgtggagagaagctggcaagaacagcctgggctctgtcccaatctcccactagaacaggatgaccttcaacactttagcccagtgatcatgtggccctgagacttagggtaggctgcttcccagggtccctgagctgtgatgcaagtggggcgtgcaggggatctccatgcaccccaagtagctttttgagccttgggggaccaattcataatgaaccctaggcttctgttgtcccttgctgcctatctgtaagtaataaacttgcttcatgtaactttctgcacatgagtatgctctctctcaccagacttagaaaagttggtaatcagagcacagcgaacctgcttcacaatcccagcttcagaactccccaaagcttggatgaaaactccactgagattgcattggagctcaacttttccctctgctcagtcctgaatccttttcttctcttcacttcctcaggtgttgatcccaaggatacttcctaataaacctcctgcatgccaatctggaacaagacaatatttagtaaatagaaaaaaaaagattaaaaaaaacttcagggagattgagtttacacatgtataaaacaaaaacatgcaactatggaaaagatgagaagaaaaataaagaggtactggaaatttacaatataatatttgaaataaagaatttaatttaaaaaacagaaccaagttgagaatatatcacaaaaagtacaatagaaaaatagatcataaatacaagaaaaacttaagagatacagagttactctaggaggtctaatattcatacaactaagtctgaaaatgattttttaaagaaaggaagagaaataatcaagaaacaagtagaacaaaatatccataggtggagaagggtcatctctagatcaaatgtaccacaacatgataagcagaatgaattttaaaaagacctataactgtatattccttccaaaatttctgaacaccaagatttccagatagttttgtaaaaacttccagtatgaaagaatagaagtttaaaataaatatgaatgagaatgacatctcactactgatgctagaggaaaatgacacaatattggtaagagtgttttctttctgatggttttgaataaaggtagaatctgtcttcctaccttttacctttttcagcttctagaagccacccacattccttagcttggatcctttcctcaaatcaattcaacttcttgcttccattgtcacaactaccaatgactctgatcctcttgttgctctcttataaggacacttatgattacattggatgcaccagataatccaggggcctgtctccatctcaggataattaatgtatcacatttgcaaagtcccttttagcatattaaggtcatatattcacaggttccaggaattggaacatagatatcttgggggccattattcagcctaccacagtcccattctaacatcctgttttccatgtgttggttttattcagaaaaagtttgtgattattattaatctgacacttaattttattgattcaactctcctaaatggctctaaatagtcaacaactcctttctgccgctgtctttgttcagtcttttctcatttttggcctacactacatcagtggtgagctgttggatctctcacctagtccatcttccttcctccattatggttatgggattgaatttaccgaaagcaagccaatctgctactcccctatataacataaaatgtatcttcatggccttcagaataaattctaaatccatttgtgtttggccactggctacctctctcttccctcatccactagcaattcccaaacatactgttacatgtgcttcatacactttcctgaatgggccacattctgtcgtttcttttctagcacttctgctttgtttttgtttttgtttttgttttttgcctggaagacccatccccttcctcagtctgacctctttccaggtgtccctcaagactcagttcattcacactttatgccttcttgtaagccttacctgaccacattcctgggctcttcacttctctcctgcagacttcttcatgatactgaaagaccttcaactgcagcctgcatgtctctgtactataagcattggcttatttgtctgtcattataaattgtctatggagattctttgaggacattgacaatgtaatctatttctatgtcttggcagaaggcctggcataccctcaaaatagtatttcttgggtgaatgaataaactctgatatgttttggccaatcacctttttatagctgttactcagtatcttttctttaaatctatctagagttttcccagatatctatatggacaaacttttatacacacacacacacacacacacacacacaccccactttctactatctattctaaccattgagttggcaaatatccattagcatacattttgcacaccaagtgcacaatatatacttgagttaaaatagactgaagttgtatcaaaaaaccactgtggaaaatgaaggaaaactggagatttcttcccaagaagtttccttcaaattttactattttaaattataagaaagctaacctgaccatcacaagcatatctcatgtttgtacatcatgtcacagttttcacaggttttaaaatcaagtctccatttgattttcaagatggtgtgagacagactaggtatatattatcccaatttcagagatgcaagaatagaagcttaagagagtgtgagttcttaaaaggaattcacaaaaattagaagttttaaaatggaaagtagaacagtggactcatctgaaaagtttgtgaaaatactgatgcctgatcctccccccaaaacaagtaaattagacttttggggaaagagggtatctctggcatctgtatgttttgaaagctcaccagatatttctactaggcagccggagttgagaagcactcaattagaagccaggtgttgtgattttacttctatggtctttattgaacggcataatgccaagtcacataggtagtatattatatcacccaactggtgatggcattaggttacttttgttatggtgcctcagtgtagtaaagataaaaatttttacttggtttcaccagttgagttaatatttgttaatgctttttaaggagagggtaagatggccaacatttaaatagcattcaagacttcagttctaagcatgtattttcctagcaccttgataactaataacaagtctgactgtgggaaagaagggaatgggtggaaaaatggggaggcaggcatgatatatggcaacaaatgtgttccatgtctcttagatactgcaagagaatgattcctaaccaaacccaacccaaatgctgtctctcaagtaattgaggaaagttcctaaccccccttaacttgaggtttcctcatttgcacagggcatattgatggtagcttggtagatcacttaaaatattagttcctgaaaacagaatgataaacgtgtctccatgtcattgtcacatgaggctgattggtaggtaatgcaaacctcacaagggcattctaaggagtaaacaatgattacatagctcttggaactacaaatagcactcattaaaaaatgttaccatgcacatgctttctgccaaggtaaactgtaatttacacttttaccctaggcataattgctagtttattctttttttctattcacacccatctatccctcccttgggcttcaaaaaagccacaagagtttttacgaaaatcatctttaaaacatgtatttaccctctttttgaaccctcagactagctctttattactccagggcattttaaatttttctaaatttgttttggaggctatgggtgtactctcccctctgtatgcattcataacccccagtaacttccatgggaatcagatacacatgtatcaaagtgaaacgaggctcttgtacatgtttaaatctgattaaaatctatttgtgataaaattaaaagtaagaactaaaatctagggaaaagagtataaaaaatatgagatcatgttgtgcataattaaaggagtttacatttatggataactaaaatggcatacaatccccggcactatttccaatatgtcctcagtttcaagttatttactgtaaagcgcccatattttaaaatgaaatgtgtgtaactgtctcacaaactatgcttggccctgtatatcttggttctgtgtcataaatacagaaaagcaaaaacactgttttgaccaatattaagtcacctgtgggtagaatttgatcttacctatttactgtcagattttaaaattatgtcataaacacttccaaaatttgcatatataagtctgcctacatatatgcccatgaaaattgagtaatggagttccaaacagtccaattttttcttataaaaccagatctgtgtagtgcataccctctatgaacattactaggaggcaaatacaaactttacatacatattttagtgatcctttgaaatgtttgctttgaaatacagatatatcatacatgcaaataaatacactaattcatccatgcatttaatgatatgaagtcaactctaaaccccacagcagtaagaggttcaatattaaaattcatttccactttacaaataaacactgtgcactgctcagataaaatgtgagaaaatatgaaactaggtgtttttcaaacgtagtttaaaataaatggatctttactgaccaacatagtcagtctggagaaatctggtaaggtatttcttcaactgtgctaagttagtgtttagtcatgagctaagtaaataatactttattaaatcatactcttatgaaaggaaagcatcaaatgcagctttcagaagcacccaaggaacatctaggaagtcaatagcttgggagaatatgtttttcccttatataggaaattacaatgtaactagatttgaaataagcattgtaaagttaacagatatgtatgatgggatacagatgttttagtaatgcgctattctaagcacaatatgattttccattccctaaccatatttgaatggagacgagttaggctatttgaaaatactgaagatcttcacctttttgcactctcttaaatttttcacattctcctttggagcagctgcagtctatcttctcaaatgaactgagctacccagtctcaatacagagcgtttaattaaagtggctatacaatggcaactgttttacagagatgtcagatgacttttgctaacacttttgcaataactatagtaattgataccattcattaaacccctactacagtgtaaggactgtgataaatactttataaacagatttgctaacccttaaaagtaagtttacaaaatacgtattttacagattagtcagatgatagtgtgtgagtagtagagcaggattcacatctaaggtcaacagtctccagtgctgagctcccctctacctcctgtggactcccccagtgtcagaacctcacacacttcacaaagtggatacctacattcaggttctgacactgtttaggaaaatcccatagaatgtggccaaatcagcaccactttttaatttggctcaagttaaagagccaattgaaagctatccagccaggaattgatggaatgagatttaagaaaggaggtcataagagaggacacctgaaactagacttaactccctacaaattacaattcaatgttcaccctcctctctttcttcaaaatgctaaaatagcaaaaagaatacacaaaaatcgatagtaaagaccagaaatacattggaatctccagctcatggcatgacaatatttcagggagaaaaattttaattcttacctaggagccacttatgaaaaacatgaatattcacaccttctttaaattaagatctatttataaactgttgcttatccttaaattacacttaaattcttcctaaagatcagatcttgataacgaacttatagtaaaaaagaataacatgtagtaaaaaataaagagttgtttttctgtttttgtgtcttttttaagctaaaagggaccttagggaattggtttgtctaatcccctcatttaaatggaggaaaaaaacaattattggtattttgtttagatataagagtattactatgacatcttactataaatgttctcatttcatccaaacataagaagattgtgttggggattacctttttaaaaagccattacattgcattatattctttgtctcatgacatcctcctggtcagctatgtatggcataagtgtgatgtgatgactactctgggtccagtgtaaactaagccaatgttattattactaactttttctatttggttgcatatatgcatccacaaatcacaatttgtcctcatttcttgccttaccataatctctgaaagggcacgaccctgtctgttttatttgccactgtcaccagaacttaggacagtgtcagacccatagtagaaagataataaatactccttgaatgaatacaatgccaacttttctgccaaaaataagcaaaggtgaatcttaaaactaacatttgcctctctcccttacctaggcaaatagtccatcatcaagtcctctcaactttccttactagttcttcaatctatttccacgaccatccctctagtccaagcaagttaccaggctcttgtctcaaataaagtgaaaaatctactccctggcccctcccagtcctctctggcttgacatggatcaggtctccacacgctgcagctgaaagacccatgatgacatatggctgactgggtcacagccccttattcatttcttagggctgctataacaatttcccacaaacccggtggcttaaaacaacaagaatttattttcttatagttctggaggccagagtctgaaatcaaggtgtctacagggttgtgtttcttccagaggctctaggaggcaatctgttccttgcctctccattctctgatggctgtcatcattccttgactgtagcttctcactcctatctctgcctccatcttcacatggccctctcctttggggtccttctcttttgtctcttagaaggacgtgtcattggatttaggggccactgggataacacaggagaactccatcacaagatccttcacttaattatgtctacaaaggcccttttcccaaatgagactacattcacaggttccaagagttagcacatggacatagcttcatgggggccaccattaaacctactacacttcctttctcaagatatttccacaattgccactttctcttaggataaaggccaaggtagataaatggactaaaaaatccttgagtggtttggccctcgattcatcttgtgcttctttcctaaacaacttcaacttttgctttatttccatttctcccctcagtatcttcctcccacctggggcagttgcaaatgctttttcttctacaaatggaaaactccttcatacaccaccctactcaaccttttgcagagccttccctagcaccccaacctcacccctagacaaagcctgcttgctctgttatactgagcagcaaattgctttccataaagacatatctgtttgtaattattctttcatgagtatgatgatatgattaatgcctggctcctccacttgtctgaagcttcatgacagcaagaatcatatatgttgtttagtttttttgtttgtttgtttgtttgtttgtttgtttttacctgctaacgtattttagatactagcacagggcttaacacatactaggaaggcagcaaatgtttgtttataaataaatgaatgaatgaattattgagagagtagattaattaatgaatatatttacattcaattttattccaactttttggggtcattctagtaaaatggattaattagtattgataggatattacaataaatctaataaaaaagattacatatacaccaaactgacatgcttaccaacttaaatgaagaattgagtcattaactcagaataaaactgtacttgtatgtatcaaatctccaaataaccttgactttattttttagtacaggcacaacctacaattcaagtctattaataatctgccagtttatcactaatcactaaatttgagttaatgggatctaatagatcctaccctccagaaattcactatgaaatagcaaaccatttcctctagaaagagtaacagattttgtataaaatatagctctcaccttttgtgattctgcaagaaccccatactaacaatggtgttagctgagagaagactggctcatgttaaatccaaagtcatgaaatatccatgctatagcaggggtatattttattttatgacttaaataaaaacacttctaaaatcacatatcctgtgataataagattcaaaaaagagcctagggttattggaacacatgaaattcaagcctgaaaagaatttagttggtttaaaattatttgaagaccatatgaaagtatggaatctccttctagcttcagcttaatacctactatcactatggggatataagtagctagcaaaaaaatcttcctgctttatgattcatattcctacatagaatgtttcctaaactctgtgttcactgaaggaaagactatgactagagtatatttagttaatcattagttcatgtataacataaatcccaaagaattctcaaggttatgataaattaaagctgtctgtattatgactcctcctacaatgaggaaataaatctaccagtataatatatataattacttttgcatgctgaaaattattaaaatggtatatgtagtcactatgtatatactatcagtttttctatatacttaattctgaatactttttaaattaaagtcatttagaatgctaaaatcaaagaagtactcagtgaaagttattttcatgcaaaaagttcattgagagttccaatttatttaaagactagagggtttgcaggctggaaaggcaaacaaacaaacaataaatatataaataaataaagactggaggaaattgtataatcataaacaaataccctaagtgatattatcatattccgctatattttcaaactgcatagatttaaaagactatttcagtgactttaagatgaatttttacatgtgggtctccattttgctgatcataaaatagcattataaggattaatttcaaaaactgaaagatttccaaatctaaacaacataataaacagaaaggagtagatgatcctgtagtacagcatcatgagtataaacttcatgtcacttgttaggtaacccactttatttcatttgcgttttaacattaaggagaactctcagtatgatagcaatcatgttcaatcatcgataaattctctttgtcacaggaggtcataagaggaagtaaaacttttttatatcacttctggttccattgactaagattccttttaaaatattggtgtttaccatgtctcatagacagatggcattcccaggcttatccatcctctgactctgggcttcaggcattggaacttttgctggatagacatcatcaatacagagtagcccagacttatttcatggacattttctccatttcaactgtgtcaccatagctttgcagaaaggacctcctggtcgaatttctagattattcccaaaaatcattttggtaattgtttttctagaataaaagtcaataaactatttgctttctaaaaatccagttttaagtggagtgtgtgtgtgtgtgtgtgtgtgtgtgtgtgtgtgtgtaaagagctgcctatatgacatcaataagctcatttgtgagtacagaagttttatgaggaaagcttcttttggtccttacagcaacccactagtacagaatgatatgcatagatcaagggataacaatatttctatgcttgtaaggaagaagatacatggaatatcctaattttagaattgtttcaaatggaatcaggagtggattttatgtaaacaatatttaagctaaattcaaatattctgtgtctacagcaagtaagaactcacgtatttttacccagtatacagttgataaataggcacctaataagcaaaaggacttcatgaggggtaagagaaagcacaaaattatttaatacaatgaataacttcatcatcccaatctaaatcatccaagcagggccagacacagtggctcatgcctgtaatcccagcactttgggaggccaaggcaagcagatcattcgaggtcagaagttcaagactggcctggccaacattgtgaaaccccatctctactaaaaatacaaaaaaattagctgggcatggtggtgcacacctgtaatcccagctactagggagcctgaagcaggagaattgcaacggcggttgcagtgagccaagatcacgccactgcattccagcctgggtgacagagtgagactccatctcaaaagtaaataaataaataaataaaaataaaaaataaataaatcatccaaacttttaaaagaaattgaggcgagaggaatgaaatagatcttagtctttatataaactaaactaattttgaatttgttatcaaaattgttatgtgaagaagatgtagctttgaagaaaacaaattgaaactaaagaggcagtaggcggagtggttaaacacatgaactctggagttaaactgcctggatttgaaccatgactgtgctacttaatataacagctgagtgatcttgggtttgttacttaacttatctgtgctgttttctcatctgcaaagggagataataatgcctatttcatacggatgttatgagaattaaatgagctaaaatgtgaaattcacttcaaacaacagtactgacatgctatgcattcattattactaatgactacctgattacagatgtggccccttatcatatagtgagagaatagccaggaaatattatagtgaatatcccgtgctccactggccgaatcgtcttcagttatgcaggtcaagatttttaaaggtagaaaataaaggaattggaacacaagaagagaaatatcataaaacttctggtgcctggacagtagttaaaagttctgactgtaagttcagagatgcatgtttaaatcctgctctgctacttactagctatgttaccttggacaggttacataaagtctctcggtctcagtttcctaatctgcaaattaaggataataatttgcagattattatttatacctaactcataaggatgttgtgaggatcaaatacaatcctacatgtaaagcactcagggcatagcaggcactcaataaaccttgtctctttttattaagtcacaacgtagtacattaatgaagacgttgcctatataacacatacctgtatcacccttaaaattttctaaagtggagggaaccaagtaacatacttaataaaattgttaaacagtacatataacattacaaccacattttatagcacggccattatattctttcagataagcaagtatgtataggtgttttccatacgatagtcacaaaatgatttaaaagtgaaagagaaagggaaaatcagtgatgccatggaacaattcaagacatatttaatttcagtttgaactgaattcttaacctccgcatttttctctaaaagcaaaagattgagtaaaaataatatattccaaatggtttctgtgatttaccctatcctctctggctgaagtgtaaaaggtccttatggcctgcccacagtagtttgggcctgagtgtcacattgaattgggcaggtcatgtaactagaggacctatgtaaggcctacatgagtagctcagtgaaacaagacagtgctcacacaagtttttaaatacaaaacttcctgacacctcctcaaagaatttgtgaaagcagttcctcaatcagcagttcacatttatgtgtgcaatgggttcagagaaaactatgaattacctttgaaaactgactttactttgttagtggataccaagaaaatatttctgcacttaacttttaatttcctgtgcttgggttgatccagccttaacattaagtccttttcataagaagaaaatcgactcatcattgaaaccaagctttggtacaatttcattgatgtttccagaagcaggacaacatgcagagagattaataaacaaagtaaaacttaattctgccaagcaatatcataactttagttttcatactatgattctaccctttgagaaccatgagaaagtctcaaatatattagctattattaataaatacacatttaaaagtcagtaactcaaggcactagaagtgttccacagtagaagttgctaaaataaaactgaattatttctcaattaaatcctactcacagataaatcagagccaaattcacctagaaatttagaaattctaacagaatcacaaaatatgaggaatgtgtggtatctttgtctcctaattgggctctcttcctcctcccaacttctaactataaacatagctcagtttgttggtagaatttctgtctttctcagaacacattcagtcacgtggctttaactatttattttctacacatgactccaaagtttagtacttcagccctcagcttacattcatgttccaatatattttctctgcttagtagaacttttcatcttctcaaacttaacatctaaaattagctcccacatgtaactttttctctcctaatgaataatcccacaagttttctagtcatccaagccgaaatcctccatatgtgacttctttcctcataccccacatgcagtcaggccctcaaaatgctttgtttggattggtggcccccagtgagccatgccccccagtatcatacctcccacactgacttgctttggccaatgggacatgagcaagggtaatacaagtgaaatcttgataagtacttgcacactgtggcttatgccctcttgaaatgctctctcatggagccttgagctaccatgcagaggtaatgctactctactgaggagattttgtggtgagagagaagcccagccagctgccacctgttccggccatttagaggagatgccagacatgctactgaagaattcatcatggccatcccaacaccagcagacaaccagtgaagcagaagacagctgagctcaacccagatggtaggattaagacaaataataggtatttatggttttaagttactatattttgggtggttagtatgcagcaacagatacctgaaatgttttttatgcagccatcctaaaaatctcaagtctgcagggatctctaccccaatcaaatgcttattgcacctttgtggacttttttcttgcttcttcattgtgtaatatatcatcttgaaccatgggactttttaattcattcatgttttcttctctagcatgactctaagtgtcttactttctgaatctagaatatcatggacccaataattatttgttgaaaaaagaaagacagaaagagagggagaagaaagagagggagaataaagggaagaaaagctagtaaactacagaagaaacaaattcgtcaagtcatactgaacaaaagtggacataagaccgtgggtaaaagtagggagaagagtactgatgtctttgcacactgggcaaacacaagagaaacgtgctgcatagataactatgactataaaatatgggtcaaggtaaatgattgaaacattttctactttgccataagatcatgggaaataaaacagaaataaccaccttacagaaactttgctattatgtactgacatcacttcttttcaacacatgcttttgtaagtgaagaaaatgccatcaatgtaagcactatcaatatatttccatatatatttcatgtacaaactgaattaaaggagactgagtttgtgttgaagagaaattaccaacagtcttatgttaggaatacagtgagtgattataattgatgacagttttagcatggtagtaatgagaacaaggtaggtttttcccatttcccactcctatcttcatcactaaaatagattcagggtgtgccattttctcttcttattagtctctgtcataagaacatggcatcagaatattaatgcctgaaagaacctaaagaaaacaaagttttgtagctttaagtctctggtgtgtagaattgctagctaagaaaaaaaaactcaagtacttcttcagaaattttagtgaaaattgtctcatttgttaggtgttttttaaaaaactctgttagaacaagtgttttgttaattagaaaattaagtgataaatattaagatactgtaaattgtgtatggtgtatagaattgctagctaagaaaaaaattcaagaacttctttagaaattttagcgaaaattgtctcatttgttagatgttttttaaaaacgcttttagaacaagtgttttgttaattagaaaattaagtgataaatattaagatactgtaaattttcaataaatactcctgaatttctccttacgttttgcaagaaaggttctttaatagtagtatgactagataaacctcacctgcaatgctaccatatgactaaaatatggtaataacaagggaaggttattggatcacatttatggcatgtctaaattacaatacaaataaatttcaatcatgtcagcttatctagaaaccatcttcatcactcaattaagttgaaacagaagacgtaagttcttttgttcccaggaggttgctttgtttatctgccaaattcacaaagacttcacaatttatctactggagcagcattctgaaaaattcagtaccatataaagacctcttagggcaaggctaagagaacttgacttagagccaggagacttgggtccaagcagcttttctacgcattcccactctggccatgggaaagctaattaacttctccaagcttcagtttcctcatctataaaatgggcataataattgattatggggatgtgagtattaatacaactaatgtggaaaatactctgtgaactctattgcattgggtctcaaagggtggtccttagatcagcagcatcagcatcttttgggaactagttagaagtaaaaattctcggaactcatcttagatctaccaaaacagagatgccaaggtgggggaccagtaacctctgtgttaacaaggtccccaggtgattctgatgggtgctgaagtttggcattgtcacttactggcttaggcaagggccttaatgacttaactcagtgcctaggttttctcattcataaatgtaggtttgaattgtgcctacctcatagcaataatatgattcaatgcgttatcatctgtagggtacagagaacagtgtcacaaaaggggcaaacagaatttaaaagtaggttattattttataatccaagtatgattctaggccctgggaataccaaggtgaacaagatagatatggtccctggtctcacaaacaagactaacatgaagaaacaaataagcagcagagaagaaacgatgatagccgattggaagcagctgtggtcctcagcacttacagagaggaatgaaaggagcaagtgaattcagcaccttcagctgagatacctgggttctcgtattgggactgatgaggcaaacagctcaacccaaggagagcaaagagaagcagtgctgggtgatgccccacccaggagtggcacagagccaagggaaccctcacccccagccaaaagaagcgtgagtgattatgggaccccacacaggaaacttcacttctcccacagatctttgcaacttgcagatcaggagatcacctcatgagcccatgtcaccagggcgttgggtccgttacatggagttatgtggagttggcagagtggccacccaggcacacacagagaacccaaaattttgcatattccagccctgtgctctgtggcaaggcaagagatatgtccatgcatgtccctaggaaggaggctgagtccagggagccaaatggcatcactctgtgggccccacttccacagtggcttgtgggttgagacccactggcttagaattccagccggcctacagcagcaggctgaagtctgctggaattgggatcgagttccccagggggaggggcagctgccatctctgtggattggtagatttaatcatttcagcctgtcagctttgaagaatacgggtggtctggacaagaaagggtcccccacagcagagcatagttgccttgccagatcgtagccagactgcttctttaagtgagaccccaatccattcctcctcattgggcgagacctccctgtggcttcagccactccagcaagggttctacagacagagctctgatctctccctgggacaaagctcccagggagagtggaagctaccatctctgtggtttggtagactcagccattccagccttctgcctctggagaatacaaatggtcaggaagaagaagggtcccttcaatgcagtgcacctgctctaccaaagggcagccaagatggcttctttgggtgggtccctgatctcattcctgctgactaggtgagacctcccaggaaggctctccagccacctcctataggtgtgttcaggctggcaacaggtcagtgccccctgggacagagcttccagaggaaagagaaggctgccatctttgctgtcttgcagccttcactggtggtacctctgggaatgggaaaaaccgaggcaactatgattggaacagactcccagcaaaccacagcagccctatggaagagtagcctgactgttaaaagaaaaacaaacagaaaccaacaacaacatcaacatcaacaaaaaagaacccacagaaactccattcaaaggtcagcaacctcaaatatcaaaggtaaataaacccataaagatgagaaagaatcaatgcaaaaacgctgaaaactcaaaaagccaaagtgtctctcctcctccacatgaccacaacacctctccagcaggggcacagaactaggctgaggctgagatgactgaactgaaagaagcagtaggcttcaggaggtgggtaataatgaactttgtagagctaaaggagcatattttaacccaatgcaaagaaactaagactcatgataaaacaatataggagctgaaagccagtacaaccagtttagagaggaatataaccaacctgatggagccaaaagacacaacatgagaacttcataatgcaatcacaagtatcaatagcagaatagaacaagcagaggaaagaatctcagagcttgaagactatctttttgaaataagacaggcagacaagaatagagaaaaaggaatgaaaaggaatgaaaaaacctccgagaaatatgggattatgtaaatagaccaaacctaaaactgattggggtacctgaaagagatggggagaatcgaacaaagttggaaaacatacatcatgataccatccaggagaacttctccaacctagcaagacaggccaacattcaaattcaggaaatgcagagaaccccagtaagacactccatgagaagatcaaacccaacacacataatcatcagattctccaaggttgaaacgaatgaaaaattgttaaggacagccagagagaagggtcagttcacctacaaaagaaagtccctcagactaatagccgacttctcagtggaaaccctacaagtcagaagagactgggggacaatactcaacattcatttttcttttttttttttgtgaatgggcagtggctcacctcatggtggactgcccaccctaatattcttaaagaaaagaacttccagcacagaatttcatatccagccaaagtaagcttcttaagtgaaggagaagtaagatccttttcaggcaagcaaatgctgaggtaatttgtcaccactaggcctgccttgcaagagttcctgaaagaagcactaaacatggagaggaaaaaacactaccagccactacaaaaacacattgaagtacccagacctgtgacaatacaagcaatcgcataaacaagtctgcaaaataaccagctagcatcatgatgacaggatcaaattcacccataacaatactgaccttaaatgtaaaatgggctaaattcaacaatcagaagatacagaatggcaaatctgataaagagccaagacccatcagtatgctgtcttcaagagacccatctcacatccaaagacacacataggctcgaaataaagggatggagaaaaatttgccaagcaaatggaaaacagaaaaaagccagagttgcaatcatagtttctgacagaacagactttaaacgaacaaatcaaaaagaccaagacgggcattacataatgataaagagttcaattcaacaagaagatctaactactctaaatatatatgtacccaatacaggagcatgcagattcataaagcaaattcttagagacctacaaaaagacttagaatcctacacaagaatgatgggagacttcagcacccctctgtcaatattagatcattgagacagaaaattcacaaagatattcaggacctgaactcagctctggatcaagtggacatgaaagacatctacagaactctccatccagaaacaacagaatatatattcttctcatagccatatggcacttactttaaaattgatcacatcatttgaagtaaaacactcctcagcaaatgcaaaaaaaaaacctgaaatcataacaaatagtctctcagaccacagcacacagcacaatcaaattaaaattcaagattaagaaattcgcacaaaaccacacaactacatggaaattaaacaacccgttcctgaatgactcttgggtaaataatgaaattaaggcagaaataaagaagttccttgaaactaatgataataaaaagacaacataccagaatctcagggacacagataaagcagtgttaagagggaaatttatagtactaaatgcccacatcagaaagctagaaagatctcaagttaacaaccgaacatctcaactggaagagctagagaaccaagagccaacaaactcccaagctagcagaagacaagaaataaccaatatcagagctgaactaaaagagagagagacacgaaaaacccttcaaaaaattcaacaaatccaggagctggtttttttaaaaaattaaaaaaaatagaccactagctagactaataagaaaacagagaagaatcaaacaaacacaatcagaaatgataaggggttattaccactgactccacagaaatacaaacagccatcagagaatactataaacacctctatgcacataaactagaaaatttagaagaaatgaataaattcctgcacacatacaccctcctaaaactgaaccaggaagaaattgaatccctgaatagaccaataacaagttctgaaattgaggcagtaataaatagcctaccaaccaaaaaaagcccaagaccagacagattcacagctgaattctaccagaggtacaaagaagagtgggtaccatttccactgaaactagtctaaaaaaaattgaaaaagagggactcctctctaactcattttaagaggccagcctcatcctgatagcaaaacctggcagagatacaaaaacaaaagaaaacttcaggccaatatccttgaggaatatcgatgcaaaaatcctcaataaattactggcaaaccaaacccagcagcacctcaaaaagcttatccaccacgatcaagttggctttatccctgggatgcaagattggttcaacataagcaaatcaataaatgtaattcatcacataaacagaactaaagacaaaaaccacatgataatctcaatagacacaggaaaggcatttgataaaattcaacatccgttcatgttaaaaactcaataaactaggtattgaagaaatgtacctcaaaataaaagacaaaaccaagccaatatcatactgaatgggcaaaagctggaagcagtccccttgaaaactagcacaagacaaggatgccctctctcagcactcctgttcaatgtagtattggaagttctggccagggcaatcaggcaaaagatggaaataaagggattcaaatagggagagaggaagtcaaattatcttttttgcagatgacatgatcctataaatagaaaacctcattgtctcagcccaaaagcttcttaagttgatacacaacttcagaaaagtctcaggatacaaaatcaatgtgcaaaaacctctagcactcctatacaccaacaacaggcaagcagagagccaaatcatgaatgaagtcccattcacaattgctgcaaaagaataaaatacctatgaatacaactaacaaggaaagtgatggacctcttcaaggagaactacaaaccactgctcaaagaagtcagaggagacacaaacaaatgaaactacattccatgctcatagataggaagaatcagtatcatgaaaatagccatactacccaaagtagtttatagattcaatactattcccattaattatgattgacattcttcacagaattggaaaaaactattttaaaattcatatggaaccaaaagagagcctgaataaccaaaaacaatcctaagaaaaaagaacaaagctggaggcatcatgctacccaacttcaaactactacaagcctacaataaccaaaacagcatggtactgctacaagaacagacacacagaccagtggaagagaatagagaactcagaaataagactgctcacctacaacaatctgatctttaacaaatctgaccaaaactagcaatggggaacagattccctatttaataaatagggttgggagaactggctagccatatgcagaaaattgaaactgtacccgttccttacaccttatacaaaaattaactcaagatggattaaagacttgagtgtaaaacccaatactataaaaaccatagaagaaaatctaggtgataccattcaggacacaggcacaggcaaagatttcatgatgacaatgtcaaaagcaattgcaacagcagcaaaaattgacaaatggtatctaattaaactaaagagatgtacagcaaaagaaactatcatcagagtagacaacctatagaatgggagaaaatttttgcaatccatccatctgacaaattatgtctacataatctattatgtctacattatagacatctaatagatgtctaatatccagaatgtacaagtaacttaaacaaatttacaagagagaaacaaataaccccattaaaaagtgggcatagaatatgaatggacacttctcaaaagaagacatacatgcagccaacaaacataagaagaaaaagcttgacatcattgatcatcagagaaatgcaaatcaaaaccacaatgagataccatctcagtccaatcagaatgactattactaaaaagtcaaaaaacaacagatgctgacaaggttgcagagaaaaaggaacgcttttatactgttggtggaagtgtaaattagttctgtggaagacaatgtggtgattcctcaaaaacctaaaggcagaaatatcgtttgacccaggaatcccattactaggtatatacctaaaggcatataaatcattctatcataaagatacatgcacatgtgtgttcactgcagcactattcacaatagcaaagacatggaatcaacctaaatgcttatcaatgatagactggataaagaaaatgtggtacatatacccatggaatactatgcagccattaaaaggaatgagattatgtcctttgtaggaacataggacatgttcctattgtcagaagttggaagccattatcctcagcaaactaacacaggaacagaaaatcaaacactgcacattctcacttacaagtgatagctgaaggatgaaaacacatggacacatgatggggaacaacacacactggggcctcttggaaggggcattgggagaggaagagcatcaggaagaatagctaatggatgctgggcttaatacctaagtgatgggatgatctgtgcagcaaaccaccatggcacacatttgcctatgtaataaacctgcacatctggcacatgtacccctgaacttcaaataaaagttgaaggaaaaaaaaataaatacaataaagtaaaatacaaaaacaaataagcaatgtaatttcaaaaagtgataagtgctacagattttgtggtaatacgaccaaatggagggattaggatgagaaggaagacctctctatgcagatggcatttaatctgaaagctgaatgaggaaaaggagcggccaaatgaaaatctggggaaaaaacactcaggtagaggacacagaagtgcaaaggccacgaggcagaaaggcactgccttgtttaagaaatagaaagaaagatagtacctggtacaataatgaggcagaaagtggaaggtggcacggtccaaaatgtgggcaacagttacagtacctgggaccgtgtagggcttttcaagagattgggtttcattctaagtgttatgggaaatcttgtggaatgtttaagcaagatagtgacaagatctgatcatgaaagagaagatggacaatagaaggggcatagtggaagcattgagacaagtcaggaggctactgcaataacatgggcaagagaaaattgagttgtggtggtggaagtagagaaagttaactgattaaaaggatatttttttggaggaatagtcaacagaatttacagatgaatcaaacatggtcgggtcagagtgggagtgaggaagaaaggaaacaaggacatgtcctattactaaatctattaggcctggtttgttgagtcctttcaaatatctaacaatttagttctaaggcaaataacaaaacaggaaatgcagaggggatttcagctcaactctgccacaaatcagctgtgtgatcctatgcaagtcactctgggttcttccattccctcaaagagcccaaggtcactgaggcaagacttgagaatttccttacacttgggttagtagagcaatgctactctccctaaaggccccagtgaactcccacaagtcaaatccagtagctgctttcctagccaagaacaatcctaggcaaaaagaacaaagctggaggcatcacgctacccaacgtcaaactatactacaagtatgagcccttgacattctctcctctcttagctttcacagacccattccctctggttctccttcttcgtcttggattatgccttctctttttctaaccacatatatctcttctttttttattcccaacatgttgtgattctgtagggttcttccttcagcagcctacatctcaccctacatccatggcttcaactacctttatggattaatgactaccaaaatctatagatccaggcctatgcatccaatgacttagtgggtttttacttactgaaatttcatagtcacttcaatgcaataatatgtcttcctcctatttacctatttggataaatagaaccaagattcacatgctcattagaataataataatattaaaagttcaaacatctactttgaaagttctagggccttccagatagttaatatgtcactgtcacttcctttgacttcccactgtttttgccttagctctggctgtcatcatctcttacctggaccatttcaacagcctttcactttctccgtcagtctccctagcatctacatcacagtcagggtgatatttctaaaatgcaaatacaattgatctgattctgtcattctcctgcttacaatccttcaataggctgcacaccaccaattcaaactccttggtatggcattcagagtcctctgtgatctatctcctgcccatctgcccagcttccatataaggaacttacataaaccctaatccagagcatacctggagtgttttagtaacagctgggaggccagcgtagctggagtggagtgagcaagagggatactggtagaaggtgagatcagagaggtcatgggaggcaagggacaggatttcaagtagggagggagagaagaagaaggctgaaatggccaccagcagatgtgtctgcctcctctgagactaaacaataatctaccctgggcttagtttgaactgatcttagtctgaactcccatctcagaccaggataccttggaagaaacacaaaattaattttaccatttcaaaagtaggatgataatcacacatacaaagtgaggtaagaaaaactgacacaatgtgcataaaattggtataagtatataaaagattatttattcattcatttaaaattcattaatggagcacctactatgcatcaagcaaaatgctaaggataaaaagtgactaataaactggtgaataattactgaccattcattacttgagagttagagtctagaagcaaaatgatttaaaaaggcaatgaactgcagtgccataacattaaagaatgacactggaataagcaaaatttccctgacctcacctaggaggcaggacatttatttaagtgattcttcccacttttccacttccttttattcaaaccatttgtttctaatattctttatatagcacccatttttgagaagagtaaagctaaataaatgtattggaaaatattaatgcttacaacattcatgaactagcccagaagacatttctaaacataaagaaacaatttcttgacaaaatagcaaagattaaggatcggggttctctgcttctctatttgtgtttatcactcttatcatcttgctattttccacctttcttgaactgtctagtgtactgaagtttaaggaatatattttccatgatattctgcaatctccccaaattagtttcttccaaaatatttgttttaaaattgacaatagaaatattattaattttatagtacacaaataattaagatcatctggaagaacataaaagttgagcttaattaacataaaatttcaatcattcccatatctcttaacaagtgccttatatatgtgagtacgtatgtgtgcagtgtgtacacacatgtgtgcatcatgtgtctctttaacatctttctttaatcatatagtttctcacctaaaagtgaagacagcacagtatatattctagtaggcaacccacttaggatgttagatttcacccttggctttccatgaatagtcttgaaaagtaatctactttcaacttacctacttacaactgaaggcatctcctttcaattgtaaggttaggaattctatgaacaaagcttattttaatttgagatgtttttctaacctaataatttaaaccttttaaatggctgttttacaacataaatttccattttaatctgtatacattaattttgtttaaaagaaaactgtctaattactgccttggtactttgaccatagagccatctcagggtgtaggtgtattctgtggctttctacctgtgtctccatgtgccctcactgcctatccttccctgctccacagtcattgtcacccccactgtcctccatgcctgtaagcctggctcttcagggttagaaaacagagaaagagacaccctcttcaagtggctattgctaaaatgccccaagggcatgccctaaacacatccttattacaacaagaccagattattgcattagttaccgtcataagaacacagaaagatacaaatagaagttaccgaattctggctctacaggtgatgcctctaataaattaaaaatagcagtccttcagatttatgtagtttcatggagttcacagaggattttcttatgcattatgtatttgatcttcataagcatctggatctattatctctctttaaagatgaggaaactatgactcacagaactagacctcccaacccacactatccactaaaccaaaatgagatcctttgaagtgggaggggaaaggagggctaaggaaagactagccaggacagtagggaaggaaaggcagaataaagtagaggttgtcaaaaaataagtatcaccatttggccccagactccccacctatcaagttggtggaaaacatttccacatttatattacttacgagattgctgctttccttctgattaccagatgtttactaagagggggaaaaagctactacaaataaactagaaatcaaatgtttgtgtggacggcaagctctaataaaacaaactaaatgatttggtcatttccttgaccaaccctaatttttgcctttttgtggcaattcagtcaggattttctagtgtagacaaacataaaattagttcctatagtgctttactaaagcatgggttatttaagtagaatttaaagggaaattaagaattagggctacttatttaaagaccaaatttttacgtaataaatgtaaaagcatagtatccatgaaaacaagcacacaaaaatgccataacaacaagtaagaaattatttggcagagaggcaaccaaagcatacaaggccatttatttatttatccattcattaattcttttattctttcgacaaatgtttattgaatatttaccaaggggtcaggactatgctaaagagaaagataaataagacacgacctctgctcttgaacagctcacatccaatgagatctataccataaagtgaataagtgactaaagagcacagtaaatgctgtaatacagttataaatcaagttccacgactgtacaagagaatggagcagttaactccatgtaaggatagatgaagactccttgaagacaggagtattttagctacatctgaaagtttgcagacataaatattttaaatgcatatgcttgttgaatgtaagtgaatgtgtttacagtcaaggaagggcaaaagtagagtaggagcttgtcttttcctttttaaagaagaagtgtgttctagaagaagtttgccatagaattcctgctgagataagagccaaaaccagcaaggagaacagtaagaggaagtataggcagctaggtagattaggatagagacacgtcctggatcaggaatcatcctaatgtagatttgatttggaataggaggtgtcaacatcacccatttacaaaaacaaacaaacaaacaaacaaacaaaaatgtatagcaatgccctggtgccatggaagtgcatagtccaaagctctagtaatttaatgtctaagagtttgttgcaaatttaagctaaaatgcattcctccataagacgctaaggcgtttttaagatattttgagatgggaccaggcttcaaggaatgaaaaagaccttttgagggtctagtgagcactggaagaaaacaccaatgaaatccttactcttccacatttggccctactttttttaatccatagatacatagcctttgaaaaaaaatttcatgttttcatttaaaagtagcaccactaatgttttattgaaatacattactaataataatatttattaataagtccctaaatgttccaaaattgatcttataagaccctagaaccccagcacactacaattgtggcatatataaaacacgtggaatgctgaggatgaaggaaaggagcttttttggtatttggtggaaattgacagaaagcattttcaaacttctcaaatttgagaaatagattttttaacattatttatctttttggatcagttttcagaacagtaactttgttatcaagagtgactaatgagtatgctttttaaaatcattgagattttaacatgcttgctatttttaatccattgtagtattttatgtagatttatgtatatatacttatttgtgactgttgacattgcaacaatattcaagaatattttggaaataatcacttatcctctacccagttttttcttttttttgcttattttcttttataagcatagttgtaaaaatcagaatgtttttaatgttttaatgattttaacattcagagtaattagacgctgaaagagtcccttgagagagaaagttgggtaatcactgatacgaagtgaaccaaaaaaatactaggtagtctcaaaactgaagaacaaggcctgaataatcggaaatagccaaaggacatgttggtgattgtgctattacagaggctagttctttataatagttatattttaatactttggaaatggatcaaaagcagaggtcatagttgaaagatcagaggtgaagtaacagggaaaacataataatgagcttttactttaatcacttaatgcacaagtttaagtctgattttctttaaacaaaggactattatttgaagaacaccaaaagaccttgacaaagagaagattatttgaagtttaagttctaaactcttttaagggtttaaagtattgtgaggagaccctttaaaacacaccaccactgttggggactcagcaaaagtgaaatgaggaagaaccctatttttaatatctttgaaaaggagattctgcctttagaagagttatccagagttcacaggttggaaaatcagcctattatagctggttttgcatctggcaattttaataatccttggactgacatgatgaactagatgaacccttatgggcacttccagacctgcaagcctatgatgtcctttccaaaataaatccttgatgtaccacaaagatcagtttgaagtatctgagaatagctgaaatcaatgcccttctttcaatatcttttggaatattcttggctaaaacaaatttctcttataggccttaaaaatgtgatgataatctgcgcaactgaactgtgtaggcagctgaaagataaatatatactaatcaatctattaggcaaaatattttttagtaatctcttaattttccaaagttgtataatagctaaaaattcatttccacttaaatattttaaaaatatctctcatctagaaacttctctttggatcacttaaaatttattgctttcttaaacagaatattaaaatattttaaatctcccagttcagttcatttgcagacataggctgagctgcatttcaattagttgtgcaaaagccatactttttcaaagatgtatataacttatatttacacaaatattcctataaaactcaagtacttcacagaagactgaatgaggaaatgttttattttaatatgtatagtgtaacctcactgaagaatttttatgtaattttattgctgtcacttagagccgtggtccccaacctttttggcaccaggaactggtttcgtggaagacaattattccatgcatgatggccagggcagggaaggtggagaggagtgggtataccagtctgtggcctgggagtcaggggacccctgacttagagcaactcttaagagttgctttaagaatctcttttacctacattgtagacagataaagccttctaagtggtagtacatggatagcaactaaaaactgtagctagataaataagtgaataaaacatgttcttcagacataaacattttcacagaagtatttaggagtgaaaagatttactacctgggatttactttaaaatcatacaataaaaattaatttatcattaaaccctttgacatttgactgattctattttttctatcttaccattaataactgtacattttaaaagttttcctggcattctgggctttcttttcttttttcttttcttttttttttttttgagaggatgtctcgctttgttgcccaagctggagtgcagtggcgcgatctcagctcactgcaagctccgcctcccaggttcacgccattctcctgcctagcctcccgagtagctgggactacaggtgcccgccactaggcccagctacttttttgtattttttagtagagacggggtttcactgtgttagccaggatggtctcgatctcctgacctcgtgatccgcctgccttggcctcccagagtgctgggattacaggcgcgagccactgcacccggccacattctgggcttttttaaaaaagaccttgatttgcataaaatataaatctttccttttaaatgtaaatactaaatattgtaaatcccaaatcttttattgcactatccagaaaaacaaaataaaataaaagcttctacaatgaaaatgtctttaaagtactcatgagcatggcaggggggtgttgggggaattctgtcaactcagaattttatatccagagtaaatatccctttaaaaatcaaatggaaaagaataaataacaaataaaagcctctgatatgaagttagtttatttcaagttgttaagattgttgttttttcacatagtcacacacacagcaaatcgcaagccacactaagaacaaatattaggtaggttggtgcaaaagtaactgtggttcttgcaattacttttaatcgcaaagcaaggcaagagaaatttggttttcaacattgttgagtgcaagacaaagcaaagccaaatttgcaaaccacatttctagccttccaccttcccaaactgctcctcccagtgcccccatctcagcaagcggcaactccaatcttacaattgttcaagacaaaaatcttagaaccatcctgggctcctctccctttctcacttctctcatctaatccattaacaaaacaggtcagctctatttacagagtatgtccaggtctctgacagcttctcgccatctcaattgctaccagctggcttcaagccactgttagctcttatcttactgtagtagcctccgagctggtctcctgtttctgacccagaccgggacaggatattgtcaacacagcagcccacagtattctttttcatataaagatcagcccacatcattcctctccagtgattttttttagatcaaaactccaacgatttactatctcaatcaaagtaaaagccaactcaggaggctgaggcaggagaatcgctttaacccaggaggcggaggttgcagtgaaccgagattgcaccactgcacttcagcctgggcgacaagagtgaaattctgtctcaagaaaaaaaaaaaagaaagaaaaaaaaagtgaaagccagagtccttacataactttcaaggtcctacataatatgatgcttcattttcctctgatgttatctcctgctcattctgcaccgcctgcactggccccttcaaacacttgaagcatgctccgttcggagctttgaacttgctgttcctctgccggcagcactcttcctccagcgacgctgtctcccccagagagctacacagcttgcctccccacctcttttagttgtctttaaatgtcatcttctcgtgaagatgaactgccctcatgcacaattttaaatagcaatctctgctccaaagccctgatccccttcactacatagcacttgttaccatccgacatactatatgtttaacttctttatttgtttattgtgtctctcaccccaactggaatataagcccactgagggaagatactgatatctgtttggttcactgctgtgttcttgacatctagaaaaatgtctgccttaataaatatttataaataaatgaatgaataaactttaaaaaacagattttcaaagcacttaatattttctcatatgcaagaaattcaaataaagtactgacttttttctttcacaaaccaaagacctcttctctttcctcaggtatatttctagatgatacttcctcccacattctcacttaaaaaattcactgaccatgaacaagcattaagatagctctaaggcattatgtttctcaagcaagagccacattgaaaattccaatttgggagactggttttgggtggattctgagttctgagaatccagaaagaaaggaaaaaacatatttaaacattcaaaattccaagtatacccatcaattcccaaaacttttggggtaatcaaattttattcctgtgcccagttcagagtttgtaaataacactttctacactcactacagatgacgccgccgggccgccgtcgccctctaatgctagcgccgcctctcgcttggctgagctccagccgaagaagggggttaagcaaggaggtcttcataccgtggtgcctgcaaagcggactgcacgcaaatccacgggtggtaaagcacccgggaagcaactggctacaaaagccttttgcaagagtgcgccctctactggacgggcgaataagcttcattgttacaggcctcgtagtgaggcacgattcgcaaacttcccttccagcgtctggtgtgagaaattgctcaggattttaaaacagatctgtgcttccagagtgcagctattggtgctttacaggaggcaattaaggcctaactggttggcctttttgaagacacccacctgtgtgctatccatgccaaacgtgtaacaattatgccaaaagacatccagctagcatgccgcacacatgctagcacatggagaacgtgcttaaaaatccactatgatgggaaacatttcattctaaaaaaaaattatcttcttcctgttattattggtagttcttaatgttagatttctccccgcccgccccctcccccggccccatggggtctgaaggtacctaaatttatgattgcgagtggaaaaatagggaatagaaatcagggattggcagtttttccattttcattcgtatgtgaatttttaatattatgcggaaacacaaagcgttaatgcaagtcaaaacgtttcagtgaacaggtgtcagtggttcaactttataataattataaataaacgtgttaagtttttctggacaatgccagcatttggattctttaaaaaacaagtaaatttcctactgactgcaactaaatggtgtttgtagcatttttatcatacagtagatttaatccattcaccaaatgtttctgagttgtactacatgcaagtacatgtttttaatgttgtctgtcttctgtgctgttcctgtaagtttactatgaaaacacattaagcctaaaaaaaaaaaaaaaaaaaaaaaaagaggctacaggtaatttcataactgtcctacacccacatttgccattccttcaatttttgagacacatacccagagatgaatatatatgtttgtctggcaaagatcaagcttgatttcaggctcctcgaggacaggaaaggtagcacacacttttgcttttatacagtgcacagtgacaagcactgagcttacactagatatactgtgatcagtttccttgtccaggctttcccgctagctgagtgaccttaagtaagtcatctaacatctctagacctgttttctccctctcttcaaccaaaaaaccaacagagttgaactggttgatctctggggccatttccagccctaatagtctaaaatgtataactctaaatgctactgtaagttactattttgtttattccatcagagtttatcaaacttgtcatcgatgctcccagatgcttctgtttttaaacttatcatgtattttttattataatttacaaatgctctttaacttatagccattttctcttaacacaaaattgtgtttgttgatagtaatgagctgtggagttttgctggtccttattcaaacaaaatcttgctctgagacttactaggaatgttttgggaggaatcctttaaatattttcatctgtcttacagctatcactccctgatggctaaagtcctaactggctttttagatttatgatattaatgaaccttgcttatgtcgttcaaaaatttgtgttacatttatagcagcccttgactatgtgtcatgccactccctacacaattagactttagcaatcccacttatcttgcttctttcttttctttttttaacctttctcttattgttcttatcctttcttgtgtaaaattctactgctttcttgtcaaaaatgcctaattctgtccttctaacccagtaattctgattaccttcaatattgctattacatagtacttgtacacattgtctattcagtcttgaacaatctttttacagagattgataactcttaattcctcaaaggaaaggtgcctacagagtatctaacgttaccatttgtcggaacatacttaagaggatttgctgacaaagtcatctctattcaaattgcatgtttaaaaacaatacccaaggaattgggttaaacgaaaataaaacaaaaagtcagtagttattgaggcaaataatatcttcattaaaacactgaaaatcggcagggctcggtggctcacgcctgtaatcccagcattttgggaggctgagacgggcggatcacgaggtcaggagatacagaccatcctggctaacacggtgaaaccccgtctctactaaaaatacaaaaaattagcggggcgtgttggcgggcgcctgtagttgcagctactggggaggctgaggcaggagaatggcgtgaactcgggaggcggagcctgcggtgagcctagatcgcgccactgcactccagcctgggggacagagcgagactccgtctcaaaaaaaaaaaaaaaaaaaaaaacactgaaaatttataattattcttaaatccatgtaactagtctcattcatctctactagtcagctgtgcttagaaccccaactgcctgcagtattgactgctggcggctcacagtgtgtccctccatacgggatcacctgtgacaagggcagctgcctctcccaagattccaccccctccctgatgacagcctgcacacaaaggtggccaacatggataaaagccttggccccttgcctcagtttgagacaactctaaagggcaagcccagttctggcactttcaatgggattccttattcccaatcctgcttcccaagattactcccaataaacgtactgcactcaaatcttcatttcagggtctttgtctaggaaacccagcctaaggcaggagatacaagcccattaaatcaaatattaagacttatagcctggttcttttttttgtctaaactaggtctggcaaatagatttcaataagagtgtcagtttatatccacaggttagaactgcttgaagtatcatcttgaaaatgattccaagggtaagtctgctgatttgtaaagagtaccatgatcaatttaggatgtcttccaaggatgcagaaggaagcaacgatggaaaagtgccagggatctaccacctctgcagcatctattgggtttgcctgcccagtactcccttttctgatagcaagaccctgattttaccttggataaacacccctctgcacgacccccaccatctcaccctctcctactccaaagacaaaacaccctaggactgaaatcagccaatctatccaccggccaaagtgaattttcaaagataggtatgtgaggtaggtcagtctgttgaaagtaaatcatttcagtgaactttcagaacttttagctgtgattttttttaggcatgagaatgtaagtctaaatatgctgtaatcataacctgaggataatctacttcagtatgaattctatatagaggaaagaagaattgaaagactactacaaccatacctgaagtcagtcccttggatttctgagttgcacgagtaaataaataatttctctttgaattaagccattttgacttgtgttttggtttctggcaaccaaaagagtcctgactcatgtacttaaattcatatctagtaacccagctatgtatgaggcaagaaactatagaaggtggaacaatactaaatattttgactcatataaaggatgattgtgcacaatgaatgttttattttaatttattcataatcatttttatttcagaaatattgagggtcacttttttcatgtaatgtgatttcatacatttagttctaaaattcactgggaaattcatgccaaaatgtgtccctagaagtagattattttgaactatttataatacctttatattattgtaacccggataccctgtccagaatttcaatttcataagcataatttggaaaactataactgttaaccaacattcattatgtgaataatacctaacgtgagtcaagttttaaactgcttctaaattgaccgtaacgtggcaggaacaaataaatgaattagacctgaggctatccacatgagcaatccaaacatattctattggtatatctcatataataatagctgatactaaacatttactaagggccaggaactattctaagcacttgatagacattaacgcattgaatttcaacaataatcttttgagacagatgttaacattttatcagttatatagaagagacaagtaatttgcccaatgtcacacaaacagtaagtaatgtgccccagattcagatccagactgttagatctcagaaccaggatactctactcatacatagttgctgtgacagagctcattataatgtttagactcaggaccccattttctttgtgcagatatagttgttttcttgcatatgaacctggcctaatcagataaagccaagcctggggcagtagacttgggacagtccaaacaccagtgcctttaaatattgtgggcgaaacttaaggcagtccaaaaatacccctctcaccaacaataattcagtattaatgtgttgtttcacgggaaacaactgtgtttaaatactcctgttaaaataaaaattagtttcttgaataagtaatatactcatcaacatttgagggtcaactaactatccagctggtttcctagcaaagcttgggagaattaccaggtaagaaaggaaagggaaagttctaagttctaaaggaggctgaaagaatgggtattgcaaaattttttgtaatatagtttcatatttgtatgtgaaaatctacattctatgtcatgaattctaaacttttcaaatcattaataaaatcacaccataagactcataagaggtggattaatatttactgaacgtgagaatgtgcaggttcagtgatagatgattcactcacacactcctcaccctttggcttctttctcaaaccattttgtggcttccacctccaccccctgagagtattacttatatctattttttaatcaccctaaaacatgtttaatgctacaatcatgatatcatatatttctcatattaccaataaacaaagggaagttttcaagtattgggggttaaaaagtcttttaataggccttagatgacacgtaggtatgaaagggtaggtagtgtcattaaatgcattcataatctaatttggccaattatagcatttattacaaaatgagcaccaggaaaaaacataatcgccagcctcttaatttgggggaaggagagtgctatagactgaatgtgtccctgtcaaattcatatgttgaaatcctaactcctaatgtgattagacagtggggcttttgagagatgattaggtcatgagggcagagccttcataaatggggttgtgctcttaaaaagagaccccggagagctctcttgccccttccaccatgtgaggacacaagaagatggttgtctataaaccaggaagtgggtgctctccagacatggactctgttggcactttgatctaggattttccagactctagaattgtgagaaataaatgtccgttgcttataagccaccccatccatgatagtttcgtatagcagccagaatgaaccaaaacaaagaggaataggttaagaaaaattacctaaaattccacgacctcttttagttataaggcttctttttatttcaagttatatgttttattcttagtcaatggctcaatagatttttaaactgaaaaaagaaaacaaaacaaaaaaaaccacaaaagattacaggatgtgaagaaaaagtgagaaaagtaagaaaggtagagagataaactagagtggaagttggggaaagagagttgagacagacctattttatacatgatatggtttggctcatgtgccctgcccaaatctcatgtcaaattgtaatccccacatgcaaggggaagaacctagtgggacacgattggatcatgggggcagatttcccctttgctgttcttatgatagtgagtgtgttcttacgagatctgatggtttgaaagtgtgtggcatttcccccttctctctctctctctctctctcctgctgtgccatggtaagacatgcctgcttccccttcaccttccaacatgattgtaagtttcctgaggcctcccagttatgcttctgattaagtctgccgtactgtgagtcaagtaaacctcttttcttcataaattacccattctcaggtagttctttacagcagtgtgggaatgaactaatacaataccaagaatttttacagtcttcacccactacagaacatctacaggcacatacctactgcttttctctaaaatctcgccataatctgatacactttccaccactctcattccccactgctcctcccagtttggggctgagtttctagtagatgaaatcacataaataaataatgaaataattttaactattagcaacttcattcatttatacaactgtgtcaagctctgtattggccactgaagattccattgtgaacaaatcagaaatacaatccaaaccatgtatacaattttaaattttctaaaagccacatcttaaaaaggtaaaacaaaacaggtgaaaataattttaattacatattttattcatcccaatatatccaaattttaacatttcaacagttaatcaaattttaaaacattaatgggacatttgcttttttcaaatcaagtcttaaaaatctagtgtttattttacacttatagcacatgagttcgatagccacatttcagatgctcaacagccacatgtggctagtgcctatcaggagacacagaatgtcttgtctttctttttacaatactaaattaatcagtggattcagatgtagtcaacttgatctttaatcagccatttattatcattgcctgaatccattatttcattagagtttgcaaaatggtgatattctattattccctccacatttattagctggaatttttccacaaagaagaattttactacattaaatctttaagtaccctgaggtacagttctcatatgaaagacaaaacaaatacttgactctttccttttatttaccaattttcagaatgagttgatttcctagcatccttgaaaagtgaccttttttggtactatcatcaacacatagatttcaatatacctgatgtgttttaacccattgtaattattattatttttgatgttcaacttgtcccaagtctatgcaataagagctctttccagctggaccctgtgtccctttgacataaccccagtggtcatcagtagctttcctatttattagcatgaaagataaacctggtttgtattacatatatttcctgcctcagacctggaatcagccattttggtaagccccagtggaaaatggcatttagagactacagtccataggagaaaaagcaaaacaaaacaaaataaaacttttttttttttctgagatagagtcttactctgtcacccaggccttaaggtagtattatgatcttggctcactgtaacctctgcctcctggattcaagcaattcttctgcttcagctgagattacaggtacacgccaccacacctggctaatttttgtatttttagtagagacggggtttcaccatgttggccaggcttttctcgaactcctgacctcgtgatctgcccgcctcagcctcccaaagtgctgagattacaggcatgagccactgtgcccggccccaaataaaacaatttttaagggataggtcaggagggcagggagaagacctgccaataagaagaagaagggacatcctaaaaaactggagaaaaacctagagagcaggtgatgtcactgaaatgaggagaaaggatattttagaacaagcaaataatgagctacgtcaaactccactgaggtgtcaatgaagatactatgttagggagatgcagggctcagtgttttagaccttttctcatttgtgtttacactcactcctaagtaatctaaccattcttttggttttaaatatcatcttctgactcatggtttacaaacttatacataagcagccctgatctctcccctaaattcttgacttgaatagccaactgcccactcaatatctccgtttgggtacctagcaagcatcttgagctggacacatctaaaatttggactctcgatttgcatgtctaatcccaactctgcttcttccctggaatttgctatctcaataaatgatacaatcattccctcagtttctcaagacaaaaaaacttggaaaaactgattcctctttctcttatcagcaaattctgtaaaaattctgcaaatccctcacatttctccagtctctagttcaatgcaccatcctccccacatgtaccactgctccagtgagttccctaaacaacaggcagcatatttctaaaatgtaactcagatgatgtccctcccttactcaaaaacatccaaatgtatcccattgcccaaagaatccaaagtcctgagctttcagtcagaacaagataaagtaaacacatttcattcatcctattcctcccactatttacaaaacaaaccaatcctggacaatattcataacgtaagtaaaagaagacaaaactggaggaaagaaagcagacagattagggtccccaggacttgaagaatggcatagctatgaatctcctagtctttgttttgttttgtttacctcttacgtatcctagtcttggagaggaacacaacctaaaacaccagcaaccacacacacacacacatacacacgcgcgcacacacacacacacagatcccaaaaggacaaaaagccctagccagaagatggaggaaaaagaagtccagcaggacataaatattttaaccatacctgctctattccagttgaacaccaagagaaaaacaatgcagccatacaccttcccttcctcaccagatgctgcagcctggagactgtgggcagagccttatcttctatctctgccatacaataaagaaatggtgttactcctccttccaatgaaagaaaggagctgttgaaatcttgagaaaacttcttagaagtccatgcatgtagccccagaaacaacatagcaaaaggtttgaaaattgaacactcttctgaaacactgcccagaattcaagttggtctctgggaagcacacaactggggcagaccagaacaacactgcaaaggctttgaaatctaaattggcatttgaatcacagcccacaaaagtaggctaggatgtatattctttatataaacaggttgaatccttgctaaaatagaagatttaaatagaaaccagagtcttatacttagtattcataatgttcaggatacaatataaaattacccattatggcaaaaaccatgaaaatctcaatctgaatgagaaaaagcaatcaaaagacacctacactgagaaaagacagatgttgaaattatctgacaaggattttgaagcagccatcataaaatgtttcaacaagtgattttgaattctcttgaaacaaatgaagaaatacaaagtctcagcaaagaaacataagatatcaggaagaccaaaatggaaattttagaaataaaaaaaattgaatgaaatttaacactcgcctattgactgaagagcaaaatgaatatgacagagttaaaaatccgtgaatttgaagatatatcaataaaaattattcaatctgaaaacaggggaataaagattgaaaaaaaatgaaaagagcctcaaaaacctactgaatgataaaaaaatataacatttgtgctctctgagtcccagaaggacagaagaaagagggcagggctgaaaaaatatttgcggaaataatagctaaaatctccctaaatttaacaagaggcataaactgcagattcaagaagttgagcaaatctctaacacaataaactaaaaaaacagtccaggctcaaacacattataatcagattttgaaaactaaacactaagaaaaagcttaaaagcagtcaaagaaaaatgatactttatacttgaaaaattcttagaataacaaaggatttctcattagaaaccatggggaagtggcacaaaattttttcaagaggaaataaaagaagtctcaatccagaaccctatatccagttaaaatgttcttcagaaatgaagatgaaataaagacattctcagaggaaggaaaactaagaatttttcactagcagaactgctgtaaaagaatggctaacggaagtttatcaagcagaaagaaaatccaaagccctcaccatggtgggtcagtatctggtgacttgccctcatctctcctggtggcatttgggtaatggtatgatacctgaaaccacagcaaccatattgcagcaatgagggtctaagcctgcaaccaaaaccaaaatcctgaggatgaaagagcttaaagaagaacacaaggattcctgattgcatcactgtatcagtgaatgaagcaatcatgaatctaacattgggcttctttttatatgatataatagatttcttactgtttaagcttttttagctgagaattattgtcacttacagctgaaattacaactgatatgggatttgggatttatttttccttgcaggagtcttcctggagaaaattaattaaaatatacagaatatttatttacaggctgggcacagtggctcatgcctgtaatcctagcactttgggaggccaaggagggcagatcccctgaggtcaggagttcgagaccagcctggacaatatggcacaaccctgtctctactaaaaatacagaaattagccaggagtgaaggcgggcacctgtaatcccagcttcttgagaggctgaggcaggagaatcgcttgaacccaggaggcggaggttgcagtgagccgagatcatgccactgcactccagcctgggtgacagagcgagactccatctcaaaaaaaaaacaaacaaaaagaaaactcacttacaaagatgtttgttacagtattatcacgattatttacaatagtggaataaaaacatgagcataggggaatatccaaataattacagttatgcagccattaaatttatgattgtgaacagtcttaaataacagaatattataatgttaggtaaaataaaaatacacaaaattttaaaaaccatttaaagtctggtaggagatacactaaaatgttgcctttgcagatgagtaatagaattatacatttctttattttttatacttttttgtatttacttaattatccacagctggcatgtataatttttataaaaataaaaactatgcttaaaacatatgcaagactataattgtgaagagtatatgtaaacatgaaaaatgtttcagtaatattagcaagttaaaaacataaaattttactaacagtgtatgtgtaccgcaatctatataccaaaatgaatacaccttttccattaaggtatcgagactgtgtgtgtgtgtgtgtgtgtgtgtgtgtgtgtgtgtgtgtgtgtgtgtgtcactgcctttacaatgaataccattaaaacagaaagtctaatccaggtttttcttcctcttctgtgaaatttttcctaacctctctcaacacagtgaatcactttcatctactagtattgtgttcttttcttgcttctattattgcaattagtactaattccaacacaactaaagtcacaaacagtgaagtaaatacattttaatatctaattcgattaaaaaggtatggattgatctttaacacctattgctaaatgaaagaagtcagtatgaaaagcctacagacagaatgattccatttagatgatattatgggaaaggcaaaactataaaaatgattaatagatcaatagttatcagggatttggggctatgaggagagtttattaggtgaaaaacagggaatttttttagagcagtgatactattgtgatggtgaacacatgatattatgcattgtcaaaactaatggaattttagatcacaaagaatgaaccataatacatgcaaatttttaaaaaaatcatttgaaggaatgcagactgtgacaaaataattgaatcatattacaaatgtataaatgtatataagtataacagaactgcaccgaagggagtggaagaaaaagttgctgacctaattaactttggagcctgtaacactaaaggcaaaaggaactatatgcaagcactgtactctagttgataaagttgtttaaagcattgtatatgtatactggaattaaaaaattaaataaatgcatggcagatagcaaatgccaggtttctcactgctgaagtgcgaaattacagataagcacagggagaaggctaaaatgatccatataacagtggatgaaaattaaagacattagccctctccctctccctccccctccccctccccctctcccgctccctctccccacggtctccctctccctctccccacggtctccctctccctctctccacagtctccctctgatgccgagctgaagctggacggtactgctgcctgattctcctgcctcagcctgccgactgcctgcgattgcaggcgcgtgccgccacgcctgactggttttcgtatttttttggtggagacggggtttcgctgtgttggctgggctggtctccagctcctaaccgcgagtgatccgccagcctcggcctcccaaggtgccgggattgcagacggagtctcgttcactcagtgctcaatggtgcccaggctggagtgcagtggcgtgatctcggctcgctacaaccttcacctcccagcagcctgccttggcctcccaaagtgccgagattgcagcctctgcccggccgccaccccgtctgggaagtgaggagcgtctctgcccggccgccatcccatctaggaagtgaggagcgcctcttcccggccgccatcccatctgggaagtgaggagcgtctctgcccagccgcccatcgtctgagatgtggggagcacctctgccctgccgccccgtccgggatgtgaggagcgtctctgcccggccgccccgtctgagaagtgaggagaccctctgcctggcaaccgccccgtctgagaagtgaggagcccctccgcctggcaaccgccccgtctgagaagtgaggagcccctccgcccagcagccgcgccatctgagaagtgagaagcccctccgcccagcagccaccccgtctgggaagtgaggagcgtctccgcccggcagccacctcgtccggcagggaggtgggggggtcagccccccgcccggccagccgccccgtccgggaggtgaggggcgcctctgcccggccgcccctactgggaagtgaggagcccctctgcctggccggccgccccgtccgggagggaggtgggggggggtcagccccccgcccggccagccgccccatctgggaggtgaggggtgcctctgcccagccgcccctactgggaagtgaggagcccctctgcccggccaccaccccgtctgggaggtgtacccaacagctcattgagaacgggccatgatgacgatggcggttttgtggaatagaaaggggggaagggtggggaaaagattgagaaatcggatggttgccgtgtctgtgtagaaagaggtagacatgggagacttttcattttgttctgtactaagaaaaattcttctgccttgggatcctgttgatctgtgaccttacccccaaccctgtgctatctgaaacatgtgctgtatccactcagggttgaatggattaagggcggtgcaagatgtgctttgttaaacagatgcttgaaggcagcatgctccttaagagtcatcaccactccctaatctcaagtacccagggacacaaacactgcggaaggccgcagggtcctctgcctaggaaaaccagagacctttgttcacttgtttatctgctgaccttccctccactattgtcctgtgaccctgccaaatccccctctgcgagaaacacccaagaatgatcaataaaaaataataataataataaattatatatatatataaaaaagaaaagaaaattaaagacagtataaatttctgtttagcttaatacagacacagattggatatacatagaaatactcatagatatgtgtatttatagggattacatacacacatatatttccttgatttttcaggtgagagggcttagaagcaatgacatcgcagcagtgataagcatacctagtgtccaaattttggtttttaataccattttccaataaaagggaccaaagctccttggggggaatggctgatcctagaactcaggcaggaaataaataagatgagcctggagcatcttgcagtactggaatgcaaaaaaatgttacacacacatacacacacacacacacacacacacacacactaatgggagtatgtcaaagggatacaggagccaaatgaaagagcttagtggacaaagttggaacaatttgagcaataaaattaagtactgttgaattataataccatactgatacaaattattaaaaattactaaataaataaatggggattataaatttctcatgaggaaacattccaaataatttatgtagatactccaccctcaagagatggagtataatttctcaatctttttttttcttatactttaagttctagggtacacctgcacaaagtgcaggtttgttacataggtatacatgtgccatgctggtttgctgcacccactaacatgtcatttacattaggcattccttctaatattatcccttcccctgccccccatcccacgacaggccccggtgtgtgatgttccctgcccagtgtccaagtgttctcattgttcaattcccacctatgagtgagaacatgcagtgtttggatttctatccttgtgacagtttgtgcagaatgatggtttccagcttcatccatgtccctgcaaaggacatgagctcatccttttttatggctgcatagtattccatggtgtatatgtgccacattttcttaatccagtctatcattgatggacatgtgcgctggttccaagtccttgctactgtgaatagtgccacaataaacacatgtgtgcatgtgtctttatagtagcatgatttatactcctttcggtatatatccagtaatgggctggctgggtcaaatggtatttctagttctagatccttgaggaattgccacactgtcttccacaatggttgaactagtttacacccccaccaacagtgtaaaaacattcctatttttccacatcctctccagcatctgttgtttcctgactttttaatgatcaccattctgactggtgtgagatgatatttcattgtggttttgatttgcatttctctgatgaccagtgatgatgagcattttttcacgtgtctgttggctgcataaatgtcttcttttgagaagtgtctgttcatatcctttgaccacttttggatggggttgtttgtctttttcttgtaaatttgtttgagttctttgtagattctggatattagccctttgtaagatgggtagattgcaaaaattttctcccattctgtaagttgtctgttcactctgatggtagtttcttttcctgtgcagaatttcttatagtttaattagatcacatctgtctattttggcttttgttgccattgcttttggtgttttagtcatgaagtcctcgcccatgcctatgccctgaatggtattgcctaggttttcttctagggtttttatggtcttaggtctaacatttaagtctttaattcatcttgaattaatttttgtataaggtgtaaggaaaggatcccgtttcagctttctacatatggcgagccagttttcccagcaccatttattaaatagggaaccctttccgaatttcttgtttttgtcaggtatgtcacagatgagatgattgcagatgtgtagtgatatttctgaggcctctgttcttttcctttggtctatatatctgttttgctaccagtaccatgctgttttggttactgtggccttgtagtatagtttgaagtcaggtagtttgatgcctccagctttgttcttttggcttaggattgtcttggccatgtgggctctttcttggttccatatgaactttaaagtagttttttccaattctgtgaagaaagtcattggtagcttgatggggatggcattgaatctgtaaattaccctgggcggtatggccattttcacaatattgattcttcctatccatgagcatggaacattcttccatttgtttacgtcctcttttatttcattgagcaatggcttctagtcctccttgaagaggtttttcacatccccggtagttggattcctagggattttaattctctttgtagcaactgtgaacgggagttcactcatgatttggctctctgtttgtctgttattgatgtataggaatgcttctgatttttgcacatcaattttgtatcctgagactttgctgaagttgcttatcagttaaaggagattttaggctgagatgatggggttttctaaatatacagtcatgtcatctgcaaacagggacaatttgacttcctcttttcctaattgaatacccgttattgctttcccttgcctgattgccctggccagaacttccaacactatgttgaataggagtggtgagagagggcatccctgtcttgtgccagttttcaaagggaatgcttccagtttttgcccattcagtatgatattggatgtgggtttgtcataaatagctcttattattttgagatacatcccatcaatacctaatttattgagagtttttagcatgaagggctattgaattttgtcaaaggccttttctgcatctactgagataatcatatggtttttgtctttggttctgtttatgctggattacatttattgatttgcatatgttgaaccagccttgcatcccagggatgaagcccacttgttcatggtggataagctttttgatgtggtgctggatttggtttgccagtattttattgaggatttttgcatcgatgttcatcagggatattggtctaaaattctcttttttcattgtgtctctgccaggctttggtatcaggatgatgctggccacataaaatgagttagggaggattccctctttttcttgattggaacagtttcagaaggaatggtaccagctcctctttgtacctctggtagaattcggctgtgaatccctctgttcctggacttttttggtaggtaggatattaattattgcctcaatttcagagcctgttattggtttattcagagattcaagttcttcctgttagtcttgggagggtgtatgtgtccaggaatttatccatttcttctagattttctagtttatttgcgtagaggtgtttatagtattctctgatggtagtttttttttttgtgggatcaatggtgatatcctctttatcattttttattgtgtctatttgattcttctctcttttcttctttattagtcttgctagtagtctatcaatttgttgatcttttcaaaaaaaacagctcctggattcattgattttttgaagggctttttgtgtctctattctgttttagttctgctctgatcttaattatttattgccttcggctagctttggaatatgtttgcttttgcttctctagttcttttaattgtgatgttagggtgtcaattttagatatttcctgctttctcttgtgggcatttagggctatcaatttccctctacacatgctttaaacttgttccagagattctggtacgttgtgtcttttttctcattggtttcaaagaacatctttaattctgccatcattttgttatttacccagtagtcatttaggagcaggttttcagtttccatgtagtggtgcagttttgagtgagttttttaatcttgagttctaatttgattgcactgtggtctgagagacagcttgttgtgatttctgttcttttacatttgttgaggagtgctttacttccacgtatgtggtcaattttggaataagtgtgatgtggtgctgagaagaatgtatattctgttgatttggggtggagagttctgtagatatctattaggtccgcttgttgcagagctgagtttaagtcctggatatccttgttaaccttctgtctcattgatctgtctaatattgacagtggggtgttaaagtcttccattattacttgtgggagtctaagtttctttgtaggtctctaaggacttgctttttgaatctgggtgctcctgtattgggtgcatatatatttaggatagttagcacttgttgttgaattgatccctttaccattatgtaatggccttctttgtctcttttgatctttgttggtttaaagtctgttttatcagagactagaattgcaacccctgcttttttttgctttcgatttgcttcgtagatctccctccatccctttattttgagcctatgtgtgtctctgcacgtgagatgggtctcctgaatacggcacactgatgggtcttgactctttaacgaatttgccagtctgtatcttttaattggagcatttagcccatttacatttaaggttaatattgttctgtgtgaatttgatcctgtcattttgatgttagctgactattttgcctgttagctgatgccatttcttcctagcatcgacagtctttacaatttggcctgtttttgcagtggctggtactggttgttcctttccatgtttagtgcttccttcaggagctcttgtaaggcaggcctgatggtgacaaaatctctcagcatttgcttgtctgtaaagaattttatttgtccttcacttatgaagcttaggttggctggatatgaaattctgggttgcaaattattttctttaagaatgttgaatattggcccccactctcttctggcttgtagagtttctgccaagagatccactgttaatctgatgggctttcctttgtgggtaaccagacctttctctctggctgcccttaacattttttccttcatttcaaccttggtgaatctgacaattatgtgtcttggggttgctcttctcgaggtgtatctttgtggtgttctctgtatttcctgagtttaaatgttggcctcccttgctaggttggggaagttctcttggataatatcctgaagagtgttttcctacttggttccattctccccatcactttcatgtacaccaatcaaacatagatttggtcttttcacatattcccatatttcttggaggttttgtttgtttccttttactcctttttctctaaacttctcttcccactttatttcatttatttgatcttcaatcactgataccctttcttccacttgattgaatcagctattgaagcttttgcatgcatcacgtagttcttgtgccatggatttcagctccatcaggtcatttaaggtcttctctacgcgtttattctagttagtcattcatctaatctcttttcaaggttttttgcttccttgtgatgggttcgaacatcttcctttagctcggagaagtttgttattacccatgttctgaagcctacttctgtcagctcatcaaagtcattctccatccagctttgttccattgctggtgagaagctgcaatcctttagaggacaagaggtgctgtggtttttagaattttcagcttttctgctctgatttctccccatctttgtggttttatctacctttggtctttgatgttggtgacctagagatggggttttggtgtggatgtcctttttgttgatgttgatgctattcctttctgtttgttagttttccttctaacagtaaggtccctcagctgcaggtctgttggagtttgctggacatcgactccaaacactgtttgcctgggtatcaccaacgcaggctgcagaagagcaaatattgcagagcagcaaatatttctgcctgatccttcctctggaagcttcatcccagaggggcacccacctgtatgaggtgtcagtcggcccttaccaggtggtgtctcccatttaggctacacaggggtcagggactcacttaaggaggcagtctgtccattctcagagctcaaacactgtgctgggagaagcactgctctcttcagagctgtcagagaggcgcgtttaagcctacagaagtttctgctgccttttgttcagctatgccctgcccctagaggtggagtttacaggagcagcaggtcttgctgacctgcagtgggctccacccagtttgagcttcctggctgctttgtttacctactcaagcctcagcaatggtggacgcacctccccctgccaggctgctaccttgcaggtggatctcagactgctgcactagcagtgagcaaggctccgtgggcaagcgacccaccaagccaggcacaggatataatctcctggtgtgctgtttgctaagaccatttgaaaagcacagtatttgggtgagagagtcccaattttccaggtacagtctgtcatggcttcccttagctaggaaagggaaatcccctgacctcttgtgcttcccaggtgaggcgatgccctgccctgcttcagctcaccctctgtgggctgcacccactgtccaaccagttccaatgagatgaaccaggtacctcagttggaaatgcagaaatcacccatcttttgcgtcgatcacgctaggagctgtagaccagagctgttcctatttggccatcttctattcctttataattcctcactctttaagtgtagagtacacatggtgcctgtcttgcaaatagtacaatacagaaaggtgaagaaaagcttaactttacagtgaagaaacctgacaaatactaccctagccaacgaattagtgttaaaattaacagtgataggtcatgttaataatatgtatccctgatatgatgtgatgagaagggcactttacctctgtggtcttctttcccaaaacccatacccacagactaataatgagagaaacatcagaacaaacccaactgaggcacatgccacaaaatacctgaccagttcttttcaaaaatatcagtcttcaaaacaagaaaagtctgaaaaactattacggccaaggagatcctaaggaaacttgacaattaaatgtaatgtggtgtcttggatgggatcctagaacagataaaggacataaggttaaaactaagaaaatctaaccaggctatagactttagttaataataacatgtcatgattggttcattaattttgaccaacagaccacataaatataaaataataataggagaaatcatgtgtggagtatatgggaactctcagtactaccatcctaatttttctataaatctatgactattctaaaatctaaagtttattttaaaaagtaattagcaatttcagccaaatactctgtccatgagacaggcagggtgatgtagatggaaaacttctgaactcatagtcaacaccaagatcttctttcaagtatactgcttgtcataaagaactctcagctacagattgtgactgtgccacaaagcagccgcatagctttggaacctgaatctgtattctcaattttaaaatgaggagttcagtagatgatctccaaggcccagaccttaaattccagcatttttatcagagataaattcaagatctgtttcactacctacgtacattttaggaaaagcctcttgacctcctgcattctcagttttgcccgctttaaactcagaagactaaaataaataatatttaaagacacatcctgctctacaaatcttcagcaaccacgtttcactgtttctgtcaactttagttcactttagccacctgacccacctcataacactaccaattatttcaggccataatttagactgaagtcttcatgagaacaaagagtagtttaattttgctcacagtggtgtccctagggcccacaacagtgcttggcatttaattgacactgaattaatatttgtgcaatgaacaatgaatgtttaattttcaaaatcatgcttacactaaagaggaaacagaaaactgcaactctcccacaaagacacccagaaggaaagagccaagagggtatgtccatgaaaccaaagagctttatcatagtaacaatatcatcctgctgaaaaatcacaatcattttgaaaactgcctctttacaaagcagggttattaataaggttataaattccttatcactttcttactgagacagaacaactgagagaagacattcagaagaaaaacacaacctagaaagccccatctctagtcataaagactaccagttgtgtgagcacaaactttaccagaggattataaaatgaataaagtaatattttccacaagaaaaacataggctgttagaaagatatcagacatattgcttaattgtggatttgagagcaaacaagccaatggggaaagtgatacattaagtttggggtagtaaaaagtaatgaaaagagagcaggaaagaaaggaagaaaacatttatgttttactatgaatatttcactacatctattttagactttggcctctagcagtgttcttaaagtgcaagctttgacccaacctcttacatcagaatggcaagggacgacagaaaaataaagattcctgaatgccactcctgacctactgaatctgaatcacaggggaagaggcctggcaatctgaattcttaataagctgcccaggtaatcttacatacaactgtgcagaagtgctgctatagtaagttgtgataatctctctagggaaaaaaaatgcttgtttacacaaggcatataactctctcagacaatcaggatgtcattcagcatactggaaatgataaatacccaaacacgttctataattttggaagcatagaaaaataataaaaaataataataaaggttaatttgaggttaatttaagctcacagagataaagaagggcattttacttcgagctcacaatggaactaaaccacatagataaggaaaagtaatttttacaagatttgacataaaaacttaaaatatttagttctaatttcagtatattgtaatcaaaccacaaattttatttgaattcatctattctaacattgtgattaaacacatattatgcctcaattggtttaattagaatggtttaatggcttaattttggggtacagagtttgacagagaaagaagtatgattaggatgatgtctgtgagcattttttttttcttgagataggatcttgctctgtcccccaggttggagtgcagtggcgcgatctcagctcactgcacctcccaggttcaagtgattctcctgcctcagcctcctgagtagctgggactacaggtgcacaccaccacagatggacaattttcatatttttagtagagacaggatttcatcatgttggccagcctggtctcgaacagctgacctcaagcgatccacccatctcggcctcccaaagtgctgggattacaagcgtgagccacacacactgtgagcatttttattgagcatagcactcatgggccatacctatgaagcaaaatttatgttaaaattagttgaaatttgattagaatttgctgtttctaaggaatgttcgagttactcttggacttcatttctctttattctttttttgacacagggtctcactctgtcacccagactgggagtgcaatggcaggatgatagctcactgcagcctcaaactcctgggctcaagccagcctcctgtctcagccttctgagaagctaggactataggtgcacactaccacacctgcctaattttctttttttcattttttgtagagactatgttgccaatctcactatgttgccaacgctggtcttgaacttccagagtaaagggatcttcctgcctggcttctgaaaatgctgggattacaggtgtgagaccctatgcttggccttttttcaccttattctttttatatgcgtttagcatgtaatgatattatcataaatggcacctgggactcaggaaaacatatttaattcatgtattctgtgaacatgagattatttaatctatttacaactggagcatcctaaggactcaagtttatctaaagaggcagttttggagacctggcttttgtttttgaaaccaatcctaacacagtttctgtaagtagatgaggatgagtatacctgttttaacagtgggagactggaaatcataaaccccaaatatcatagtgattcattcaattatctatctgataattcaccagaatatgcacaatttctgttcccatgttttttcttagcattaaaccacttcctcatagtcaaaagtattaaaacctgtaagagtgttgctcactgaacaactcatcttagtctggaccactggctaccctgaaagcaaagtttcctgattcttatcttaacagaagattttcgctggaaagtataaaacaggagcaatgagtagtttattttaatatagtattaagtattggtttgatcaactttaaaacttattgtcttagttagaaaagtgaaaggaatgtgcaagtcctatccacctagaatagagttcaaagtccacttttgactgaagtgtaagctcttcaaaggagcctgtctccttcattgttgaattccacaatatctaacatagtactgtgtatacagcagagctcaataaatatttgttgacttgacatcatatattcactttataaattcttaactattctgttgtccttgaaaatagttcaagaaagttcttaaaataagtttactatagggcctccttaattttagtgctcacttcggcagcacatatactatagggcccccttaattttaaaagattcctagagtcctgaaatatatgtaggaatgaagagttatttttgttttatttatttgttgtggcacatccatggtacaagagaatatagtcaggctctccagagaaagagaaccagtaggatctatagatatttaaaagaatttcgtgggccaggagcagtggctcacgcctataatcccagcactttgggaggccgaggcaggcggatcacgaggtcaggagattgagaccatcctagcaaacactgtgaaaccccgtctctattaaaaacacaaacaaaattaggcgggtgtggtggcaggcccctgtagtcccagcaactcaggaggctgaggcaggagaatggcatgcacccagggggcggagcttgcagtgaggagagatcgcgccagtgcactgcagcctggacgacagagcgagactctgtctcaaaatatatatatatatatatatatatatatatatatatatatatatatatatatatatatattttgtggtatcagctcacagggttatggagccttgagaagtcccaccatctgcgatctgtaagctggaggcccaggaaagccagtggtgtagtgtcagtccaaactcaaaagtctgagaaccaggggagccaatattggaagtcccagtttgagtccaaaggcccaagaactagaagcaccaatgtctgagggcaggagaaggtggatgttccagatcaatacaagacagcaaatccaccctttctctggctttttgttctatttgagcccttgatgaactgaatgatgcctacctgcattggtgagggaggatcatttgtactcagtctactgattcaaatgtgaatcttccctaacacccttatagaaacacccagaaataatgttttactagctatctgggcatccattagcccagtcaaatcactacataaaattaacttcataaagagtggcacgtacttaattttcagaccattcttcagtaagcaaaatttatgttaaaattagctgaaattgccgggcgcggtggctcatgcctgtaatcccagcactttgggaggcccaggtgggtggatcatgaggtcaggagttcaagaccagcctgaccaacatgatgaaaccccttctctactaaaaatacaaaaattagccaggtgtggtggtgcgtgcctgtaatcccagctactcaggaggctgaggcaggaaaattgcctggagccaggagacggagggtgcagtgagctgagattgcgccatcgcactccagcctgggcaacagagagagagtgagactccgtctcaaaaaaaaaaaaaaaaaaaaaaattagttgaaatctgattagaatttgctgtgtttgaactataggtttgtaactttgattaaattcagcatttctaagtgattaagtaaatgaaataaatgctggaatttctgaaaaagcaattataatcaaggaaaacatttttcacctagttcttcaagataaaatggcaatattggagttattccaattacaatagttcaagaaaaaatcctgattgctatctcttgtattgggtggtaataccacataagaatacttcagacagtggaaatacaatagtaggagcaaagagtatgcaaataaaaacctcggtagcaaatttttggaatgaagtttatttgctctgtgcagaaatgcttctacatttttaaaaaatttgaacatatgtgcaaacagacaccaacttaaggtactgaaaaagataatgaagttaataaaggaacaagagtttggtagttctatgtttgataatataattttggaggtttaatttgatttttctaaaaattgtgctttcatattaacatcttattatttatcattcttcattctgcaagtgtactatgttccagtaaaaggcttcacgtgcatctattattgatgggagtataaacacaaccattctggaagacaattttactgggactctcaacttttcaaatgcacatgccttttgttccaacaattccacctctaatttggtctttcataacttatttgcacatgtgcataatgttaggtgtacagattttttcactggaatgttttttaacagcaaagagctagcaataacatttagacctatcaatagggaacttgttagatatatgaagttgcatgctatggacatgggtttctattattttcattatcttattttttaaaattttagattcagggcgtacatgtgcttgtttgtcacatgggtatatggcatactggtggggactgggtttctagtgtactcattgcccaaatagtaaagattgtacacacattttcatcattttattctctactcttgtctggatgttgaatattttgtaatatgaatactcttaaaaagtaaaaaaaacatgtgatggattgagtctatgaaattccacaccactctaaaagaatagtgtaaatctatgtccattcacttgaaattatttcaacgataggttgctaagcaagtcacagaacatacatagtatgatcgagtcacataaacaaaaaatcaaacatatgtagggaaggaatggggtgagtatggaaagagatctgcaagatatgcaccaaattatttattatggctgccttttgggtttgagattggtgtggggagaggcagtatattaagattttgactttttactttatgaatctttgtattatttatttttttctttttaataagcaggcattacttttttttttttgagatggagtctcgctgttgtcacccacactggagtgcagtggcgcaatcttggctcactgcaacctctgcctcccgggttcaagtgattctcctgccgcagcctcctgagtagctaggattacaggcacccgccaccaggcccggctaatttttgtacttttagtagagacagggtttcgccatgttggcctcgaactcctgacctcaggtgatccgcccaccttggcttcccaaagtgctgggattacaggtgtgatccactgcgcccggccgcatgcattacttttgttttgctttttataaaaataatgaaaggaggaaaaataaggggctctagtaatttgtcagcctacattttttctaaaatgaattagttttagaaattcagatgaaaatttagaataaaataacttgtcagatttagaaaatcagatgtacatactattgtaactgagaggacatgtggaaataatttgaagaagtggactaagcatctacatttatatcttattctgttatgattatagcattgatgtagtaattgtttatataagttacatacattgactcaagtgttgttaataaaactaataaatcaaccattaagaagcacctacatataatttacgttgcttaaatttaaactggatttcaattaaatacagtggacactagacaagaaattccagttgtaactgagaaggtaattttgtccaatttcagacaagaggataacttctgaggttggttggcttttctttcatacattgataggtaatagttttaacctgcattttacctgtcagagatgttgttaatggcaggatcatgtaggatcatgtcttattcatctacctccacctagctcagactctgatacatagaagtgctcaatacttcattaagttggtttttttcccctgctattataagttgcattttaaatcttctcacatgaattctttttaaaggacatttgatccaaaatcctataataatacattgtaaattaacactgattttgacctaaaattttttaaattctgaatcctgaagttttctttatagccaaattacaaatttggttaatccagggtaaaagacctcatttcatactaatgatgctgccgcctcactctctattctccaaccacacttgccttcttccaggctcttgtacacatcaagctcatcaccagcacagggccatttcattggttttcctttgttcccagacttccacatggctaatgcctttatataattcaggcctgaacagaaacatcacttccttagtgaaattattaatcaatttaaagtagctctcaacactcccagcccaattcctaccctttctagtctctcttgttatgtaaccctgtctcactgttttcaaagccttcatcaattacctgaaattatcttgttcatttatttggctccttttatattgactctctccccttcttccctgattggaggtaaattctatcacagtggaggcctttcctgtattgttcacttttggatctcccatgcctagaatactgagtgttctactcacagagggcattcaaaaaatctgagaatgcatatagtaaatatgaaacagcaagtgcatgtctgcactgatcccttccttggctccttgaattattcctgtcatagcaaatacttgatatttctaaatgatacacccaacttcctctaaaatcactgaattaacagaccatagcatacaatttcatcagtttcctcaattataaaactgttatactactatgcacctacttcagaaggttgtcacgaaaattaagaaagaacagcaaatccatgttgtgtggatgcagagggctcagttggcttactggcaaaatgcatgatataaatatctatacaaaaaaggtatcaactaaggccaagcgcagtggctcacgcctgtaatcctaacacttcggaaggccaaggtgggtagatcatttgagcccaggagttcaagaccagcctgggaaacatggggagaccctgtctctacaaaaaatacaaaaatcagccgggcatgatggcacatgtctgtaatctcagctacttggggactgaggcaggaggattgcttgagcccaggaggttgaggctacggtaagccaagattgtgccaccacacttcagcctgggcaacagagtgagatcgtgtctcccaaaaaattaaaatataaggtatcaactactatttcaaaccatgcattttgggtggggttgggagtaatggctggtagaataaaaaatgtgctggttatcaaaaagtgtaagacaggctagtcacagtggttcgcacctgtaatcccagcactttgggaagctaaggtaggaggatgacttgaggccagaagttcaagaccagcctaggaaacatcgacagacattatctctaccaaaaattaaaaattaagaaattaaccaggcatggtggcatgcccttgtaatcccaacgacttgggagactgaagcagggagatcgcatgagcccaggagtttggtgttacaatgaactatgatcatgtcactgcactacagcctggatgatagagcaagaccctcatttaaaaacaacaacaacaaaaacaatgaagtatgacaaaataagtgataagcttcctttaatacatgatctcttaatgtacacccagcttggtgagcagtgtacccttgaagaaaagctgagtctgtcttcactcaggaaagtagacgtggttcataaaagatgagagtggaaggcacaacaaagttacttgagtaattctacttccaaatgtgaaaaccacattatctacatcatggactaagtttctaccaccaaatgaaacaatgaatattgagcaaagtcaatatgacttgcattttaaaataactaaatttcctgactaattcaaatgaaagtatgatcagagaagactatttcatttgtattatataggcaaatctatagctctatagcttaaaaagataaatcagagaaacattctgatgttagctatgacaaatgtgtcatcaaacccgagtggcaaatagggaatggtatggcagaccaagttaaaaggtgatttggtatcatatgtcctggacaagatgaatgtcaaaatagtgtaccttggcagagtgtttaataggaaaaaatgaatgcccatgctccaaagcctccacagccaaaatggagtagtccattttaattttcagaggaatttggtgaacaaatgactggatatccaccaaaccttgatgctaatgaaaaatacagtgcattctgagaaaatcaatatatagtttgcctgaaggtatcccaaaggaaacattcagttattgaggtttaaaatatgttagccccagaataataaaattcttgaattgcaggcgtttgcaagaacagcaaaggggttaaagacattttatattttatcaaagctttaaaactgctgtgcagagttttcatgcatttcatattttttccttgctgctgcttcatgcaaaagccttcaccaattcctgagagctttgctctactgtttagaccttcttaatttgttcttcaaataaaatatcctcagtcccactcctacctggcttccacaggttcacagggttactaaagattgggttggaggaattgggagcacatcctgaggaacagatatttgtcacaatgtctcaggattgtttgttgttttgttttatttcgtttttggaaaataaatactttttcagccaaaccactttgggctttaattttgtttataaatcttattttgttcaatgacatgaagaaaaatagggaattctctatttaaaaaaaataaatgcaagaaaaatgtcaagatgcaaatataaaaggctcagacggtctctgtaagaaacaaacaaacaaacaaacaaacaaacaaaaaaccctgaactataggttggcaatttagcagctcagtttgtagtaaatgatgatgttaattcagatagtaatctaatttgaccctagcagtctacacttatgagttaattcttcagtaattgttcaataatcgtgaattgaagtccttcttagagaggtaaataagtattttggacataaatcagacaaggtagtttgatacatgcaacatactacatttcccttcttttgccaagttacaaaactatcagtagtttgtcaaagggatgattgaagaaaagcatttgccaaaaactaattttacagaacaatactaaatgcagtacagaagtatttaaaagtagtatcaatttaataaacatttttcttcggattaaaaaagtatttgagcatactgacaagtacatttttgtcttctcctgcaaatactactgaacttgctctaatattggtaatgagaataaccatgtaagaaggtttttacaaagttagcttcataattatcttttagtaatcacttatagccttttgatccattgagtcacaaacagaagcattgggatgggattttcatattcagaattcatcacaaagaaacatcttataatttattttgtcagtgtagctctaagtcacttattcctatcctttatttttgaactcttcggaatgttcccaagttcgttggtaccatgaaaatttcttacattttcaaaacaaaatttttgttcattctaagaaaaaaaagactgggcgcggtggctcatgcctgtaatcccagcactttgggaggctgaggcaggtggatcacccaagtagtaggaaaatatttgccatcctctggtaggtttcatcagtaaatcacctacagatgatatgaggagtgaactcctaagttgtatatccctcatatatgtgatgctgaaattgcgttgaaatttgtccctgagatttgtgctgttctttagaaactatgatagcaaaaaatagcacaagattcccagtcttaatccaattgaaaatcttacttgaattcgagtccactcactatggtttagtttaatactatcagtgaatgaaacaaaatatgaccatttctttggcaattttcaaaaagaacttcactaaatacttaagagaataaaaagaaaattaacaaaagactataattgccatgaacccatgcaaattataacagcttctgaatgatttttttattgcagaagaacttcttgttatcttacttagtcatttaggctacattaatccattttctctcagaaaaaaatataataaatgaagtacatcaatattgtaaaatatcagcactgaaaattatcataatgaagacaaaagtaaactttgacatgaaatgtgaatttttttaaaaaatctaatatagatgtaataagaaatagtaagaaatctacatgtttttatagaatacataaaagtttatagtaaacatatataacttttcatgagtatttaatacatatcatagtattacatagaatactacctggttataaagttgctgctttctgccacattaatgaatgactatgacctggtatatatttaaaaggtagcactgcgtaatggaaagaactgctttgagagcaaatacatccgtgctagatatgaccactttctagtggtatggtaatggacaaattgtttttatttctatgaggttactgtaaggattaaataagacaaaatatgcaaaacacttggttcagagtcagcttctagcaatcaacagtgtttgtctcatttgcaactctctttccttaggatgcatagacatttattccattttttaagatattaacaactaaccaatacagttgatggttttgacagacacctatatttttagaacaatgtcacacaatcttcagtgaatatcacaatctagcctgaacctggccatatctgtcaaagataaacattttttttcagagcatgtttgtttgttcattagacaaaaaaaattaagaccaacctgttagtggtttttggagttaatgctttgatttctatcatgtctattttttataacctgttaactcatttatttcaaaaaattgtataaacaaaattcaatcataaatataataaaatattgtgattttaataacttctagaagatatcttcatataattaaacaatatttttaaggtattaggaagggatacataagtaaaatgcactgaacaattcagttgtcaattaaaatcattttacaattcaatgcttgacttgaagctaaataatactattatagaaaagcaaataaagtttcaagtaatactatgtagaagaaagtaacactcagatccaaaaatactgtgaactctaagttagtcttatttatttacctcaaaagtcccccgatagaatactgaattcagaataacattgcggatgaagttctcagtgtttgcttattttttaaaattatgacagagtttttctgatctttcaatactacaatcattttttgccccagcaatccttttctagttcttaaaatactctgtggaatgtacaataaggttaaacataacattctatctttgaggttttccttgggcagaagaagaaatttaaaaatattacttttatatattatggcctgaagaaagcctaacagccaaaacatcacctttaactcagtttctatttttgagtagtttatcaaccaaccccctccttcattctttggtctaaaaactgttatgggattcactgtcagtattttaaatagattctggctctttagggtctcattacaaagtctctcaatattacaaaccttttttcctcctcattgtacaatagcaaatgaatgcttagtccagttgcagaaaagacagcataactggctatttatttaggttcaaaatttaagattcacttttatggtatgtgtattttcaaaccattcacttaaaaaggatattctttctatattaggtaataggctgggtcataaccatatagatattcattaattcacaacatgtcctaaacctggggttgttgtaaaggtgaatgcacagactgcagttggtttagaagtacaaacttgaaggctgggtgtggtggcgcacacctgtaatcccagcactttggaaggccgaggcgggtggatcacctgaggtcaggagttcacaaacagcctaacatggtgaaatcccgtctctactaaatacaaaaaaaatagccgggtgtggtgacgcgtgcctgtaatccgagctacttgggaggctgagacaggagaatcacttgtacttgggaggtggatgttgcagtgagccaagatcatgccattgcactctagcctgggcaacaagagtgaaactgctaaccatcaacagatagtgtggaactattggctatctatatacaaaaaataaactgattcatacctaacaccacaaacaaatacaaaaacaaaatggaggatagaccaaaaaggaaaacctaaaaccataaaaattctagaagaaaaaataggagaaaatatttgtaaaattaggttaagcaaagatctcttagattcaaaatcctgacgtattaaaggaaaaattggtacttcatcaaagttaaagacttttgctcttcaaaagatatggtcaagagaatgcaaaaaaagctacagagtaggagataatattggcaaataacatgtatttgataaagaacttgtacccagaatacataagtcaaaaactaaaactccttagcaataaaaccaacaatctactattttaaatggacaaaagatttgaacaatcactttaccaaagaagatatataaatgtcactaaagcacatacaaaggaaattttctaaagtgacggatatattaacgatcttgattgtgatgatggcttcatcaatcatcaggaaaatgcaaatgaaaaccacgacgagataccactacatacctattagaatgtctaaagttaaaaagggccagacccggtggtttacacctataattccagcactttgagaggctgaggtgggcagattatttgaggccaggagttcaagaccagcctggccaacatcacaaagcccctgtctctactaaaaacacaaaaattagctgggtgttgtggtgcacgcctgtaatcccagctactctggtggctgaagcaggagaatcacttgaacctggaaggcagtggttacagtgagccaagattgcaccactgtactccaagctgggcaacagagtaagaccctgtctcacaaaaacaaaacaactttaaattaaattaaaagactggacacactgtgttgctgaggatgtgaacctagaggtctcatatactgatggtggaaataaatactagcaaagtacaactttaaaaaatatttggcagtttcttaaaaagttaaacgtacaactaccatataatccagccgttccactcctaggtatttacccaggagaaatgaaagcctatgttcatacaatgagttaaacacaaatgttcatagagactttaattgtcaaaaactggaaataatccaaatctccatcaataagtgaatggataaacaaattatggtatatctatccactgtaatgctactcagaaataaaaaggactgaactactgatgcactcaacaacatggaagaattataaaatgattattctgagtgaaagaagctaggccaaatacaaagagtacatactgtgtgatcaaatttatatagaattctagaaaacacaaactaacctatacttaggaagattagaagctacctgagtaacttggggaaggcaggaaggggcaggagggctgaattataaaggggcagaaggaagttctttggggttacaaatatgttcattatcttaattgtgactgtgttgaaactatccaacagggtgaggagaccttgtctggaattcaggggattctttgggcacttcttagggttagcatgtctaatagtaaaagttaataaaaagctacaattaaaaaagggcagaattcagacacatcacaaatgaaaatttgggtaactctgtcatgtaaaggactttgaccagctgaggtcctggctgagagagggcaaaggaaacatggaataagtaatgagagaaggaagttataaacatcagctactgtctctgactagttacaaaaattaaaacaaattggctctgcacattttcttccttcctttgataatttgggaattataactctaggccattggttcagtgaattgagaaacccaaaatagccaggtgaaattcacacctttaattcaatgaaaccatatggatcctgtgatgaagaccttccttccttaggaagcatgaactccaaacccaaggctgtggaaacagaaagcaaaaattctggaagtgggttttaactgtaattgtaagaggagccactcctacttccaaccctgaattcccagacccatatattctggctatggagataaagcaacatattttgatctttgattcaaagcacatacttcattccctaaggtaaagccccatccttcagggtgttgtctctcatctgaagtctaatttagcctttaggaggccattccacttttattgggccaactgtttctagatgatgggatatatggtaagatcattgagtccttggacatgagaccattcctgcaattattttgctatgaaatgaattccttttgataggaagaatgttatacagaataccatgagcatgaataccatgaaggcattctctaagaccaggtttggtggtgctggcaaaggaactaaatctatacccagaatgcatttcttattccagtgaggacaaaatcagaaacaacactgagtctttggggagaaccagccaccctggttctgactggtgactgttgcttccatctgatgttagcatattaagcaatcggcagtagtggtaaccagatcagcctcagagagggaaagatgttgagtccatgctgagcttccattcctaccaccatggccaccttgtatatcgactgattgagtaagaaccaggacggctagggaaagaggctgtctgacatccagacaataaatgagtaaatctatccatgtgattactgagtgttctctgcagtggataattttttacgagcattcatgtgggacataaatatcttcataccctgtaactatttgaaaggtacctcttccccagacttccttgtcctgttctttctgagtttctgatcatctgatcaaaccattagcaactgctcataaattcatgtagatatgtatcttatgggtgtaattgtgtctcctcaaaattcatatgttgaagtcctaagccctagtacctcagaatgtaactgcatttggagatagggcccttaaagagataattagggtaaactgaggtcatatgggtgggccttaacccaatatgactggtgttgttctaagaagaggatattaggaaaaagacaaacacaaaggaaagaccatataaatgtacaaggagaagatagccatctatcagtcatggagagagaccttggaagaaaccaatgctgttgacacctccatcctggacttctagtctccagaactgtaaggaaataaatttctgttgtttaagccacccggtctgtagtactgcaatatggcagccttaataaactacaccagtgtagttctactcatctctcaagtcagacaaaatggacagcctaatggacggcttgaaattctgcctactagaaagattgcctttcgttaaatattcctgtagatcaaaacattctaattaccactatgtcgctgcagcccttaacaacaaatatgcccaacctgtttttggaaattaagtgctgccatttgaccgaaagaagacaattaccagaaagctgttcaaggatgcaggtgctcctttcactaatgcacttctttaagcctttgtaaagtgagtgtcctctgggctgtctgaggtgatgtagttaggtaatagctatgcacaacatgcataagtccactccaatattcctgtcatcataaacctttggcttctactattccaaagaaattctggcatattttcctcattatatatataggccaccattgagtctaacttttagtcaaccaaacaaataaatggttagagtcacttccagctgcacaagctaatgcattaaattcagaatatctagtaagagtatccatatcaataaatgtggcccaacccaatgttatagtacttcttccttggtccaatactcttaagaattcattcctggctgtatttcccagatttcatccaacacatatcagcaaaattttgcagttctcttagcacataagctatttcctccttgctgaaacttcagacttgtattcctggagcgtactgagatatgaccctagtaatgagtctagtgacaacaaagaatggttggggtgggtcttgagaagaatggcattcccttgcaaagcaactgcccagggtagggttatcagaggattttcaataggggatggctagtcttagacatgaaaagacaatttccttccattaacaatgccttcaccccccatttcagaatcccacatcttccaattgatgcccttacttttatgggacagacttggcaaaaccgtgaattcaacttatgttagaattgtgtagtctgcataattaaatttggtgttaaattttcagcaatataggtttggttgctacaagaaataaggttattttaaggctaatatagaagctctcaggttctctcaccatgttttaaaccaagagttagaaacctgtgcttaattttcagcaatatagatgtggttgctacgagaaataaggttattttaaggccaaaatagaagctctcaggttctctcaccatgttttaaaccaagagttagaaacctgcgcttctcatttgctttctggaaatttccaggtcattcaaaagaattcatcccataccaaggtccttttagtcattaacatagccatagtggccaagagtggcacctgcttagtctcccaaaatgcttgtctcagaaggtacttaattacagtcaactataggtgataatttgattaattttgatgttactacatgccatgggttaccagcatctcatatcctattggtacaaatttcagcattttattcaagcctaaggacatttccaaaccaaccccaaatcccatttttataaaataccctcaaaatcattctactttatttagactttctttagtatatatccaactcatttcctagcctgtaaaatatgattggtaccaataattgtataagaaaggatgaccagtaataaattgcaaaaatgttttcaaatgtgataaactctcatgtgaatcactgaaaaaagcatctttcttactttgtagtaagtctggtatagtgattgggagctaacatttaaatgataaatctaatgcttatttcaaaccaacaattgtacactgcctctcaaggaatttgtatgtagctaagccacagattgactctgttctgattttacatgtattaagggcactgtacagatactgaaaccaaattccttaggaaaaaagagaacgttttaatttccactttgattttgtataaattctttttgactgtcctaaatgtatagctatttgggagaaaataacaaggcctgtaatctttttcatagctatcacattatagtaaactgattttttttaatttcccttctctctaattcctcgtggtaggtaggaaaaagaaagataattatctagaattcaacttttactaaatagtaagatggcaagcatcaatactacttctagaaccaaaacaaaatacaaattacaaaaactagttctagaactgtatctcttaagcacaaagtgaggttgcaagacagatgatgcttttctaaatttaaacaatgttcataaaagaaagcttaactcttacaaatctgtagattttgttctggaacttagatattgagtagatccagttccctaagagtcatgaatgtcacagtgtcaacaaaatgtttcatagaatatgactcagccatttaaatgagtaatgataaatcaagttacactaatttttttgttctacttacttcagccatcacaatagtagaaaacaatggataatccctaatttgtaaattgactctttcattatatcaagttatgttgtaacagatttagtataatacatttgattaaacatttcaagaatgttgaatcaaactgatataattgacgcattacgaaatattaaaatttctacatttaagggcaagggatccattcaggaaacagaattatgtgatagaaataattgtataaaaattgtgtagtccagtggttaattccgtagctacatattaaattcatgttgggaattattttttgttttttatttttaaatgatgaggccctatctaaatgagaaactttaagggttgagctccaatattggtagtttctaaaagtttctcaaccgggtatgagaattactctcacaggcatctgtatcaatacaatattaatcaaaaaattatattattttctcaaagacttctttaagaaatgactagttaagaaatgaaatgataatttgaactactatataataatcagcttcagagtgggcatatttcctatcaatttatcatgtaagatttgaaaaatattaaacaatttttgctgttaaaatttaaaattttatacttaattaaaataaatctactcattagtacttttttccttgttgtttttactgtttacatatttttcttagtgattcttccacatattctaaaaagtcagataaaaatttaactaaaatagacaatcctttgattcatttatgtatttataggaggtttttagagaatcctgatagagtattactcagtagtttaaaagactgtgtatttcacatttaaacattgtcaaacattaaacagagttaaataaaataaaaacaatgtgtgatatcctgaaaaaataatcatagcactgcatagcgctgtaacaaagaatgaatggaactgaatcttattttatgaagaaagccttctctaagaagtgtgtttttaaaaactgaaagcaactgttatttatggataactcattttaaagttaaaatcactgtgatattccaaaagttaaaaaattaacttttaaaagtaacatattaaaatattagacataaaatgttgacattacgtataacaaaacagtacatttcaactataattacagtaaaaattcaagaattagcatatctccataaaacttttttaaacttagatgtgaacctttctactcgtagtatgagtcaataaaatccctgtcctgaggttctaatgggatcttaccataagccctatcatcattgccccacatcacactgaccgcaagattattttatgcttgattggccttggctcaggattcctatcataggagtaacaaatggcctggccatacagatggaattttgttttattatgatttcaaagataaaaggatcaattgcttcccaagctttcccctacttgattacctgaacttccacaattaaaaacctacctcataggttatcatgagaggttaaatgagttaatgtttataaaacacacagaacagtgagtgaatgttaacacaattttcattccttcaacctacagtatgttttaagaaataagacatagctatggtttgaatgcatatgtccctgcaaaattcatatgttggaacttagacctccatgcaatagtattaatactattaaaatagtattaatagtattaaaatagaccccctattaaaaaataggagccttttgggaagtgattaaattatgagggctcctccctcatgaataggattaatgagcttataaaagaggcttcagagaggtgcctgcctttccatcccttttcctcttctgccttttctgctatgtgaggacacgctcaagaagaggctatagataggacaagccctcaccaggaaccgaatcaactagcactgtgatcttggacttcccagcctccagaactgtgagaaataaacttctattgtttataaattactcagactaagggattttattatagcagcaagaatagactaagacagacattaaaccataataggaattttcacttgagggattagtatatttcaatcccgtccctagagcaaggataaatagggccaaatcggagaggacaagaaaaaattggatatcttctaaaaggaaaaaggatgtgaaaacagaaaaacaactgtgaaggtaaaaggctcagaacaaaaatgtctattactaaactacaagatacaaatgtccctccctttacaactttgctcagtatcaatttgccatccatgccattaggcaatgtgaaactgcagcaacacagcctgctcaattcttctgcagagcacgcagaaccattaactcatttttgttactaaattcagaggcttaaaaaaagttagcatatatttgattcaaacaatgcttgagtgctaaatgtgagttatgttattttaattttctttacatcaaagacacctcttcacacacatttagacttaaggtaaagcaaagttgtcacatattaacattagggttaatatgtttagatagttaacaatatcacatatagtgaacataatttcaatgcaaattttctttctataaaattaaagataaaatttcacacataaaaattggtagttttcttaagaaattcaaatactgaaaacatataaatgtagatttaattttgaaatatgtaaaatttgaagcagcaagtgtgcatatttataaattgtgcctacatataccatagcaactgaatgcaaaatgaatattcaattcattttcagtacaaacacacaaaagtgtttttttccccattcaaatgtcctctgtttttccccttaaatgatctactactttgataatttatgaattcaaagtgctggagttttactggcttgctgcttttcttaattattgagatagataaataaatcataatgttctttaattggagctttttgtttgtttaaatataagcttatcctgaccctgattctgtgatatctaagcatttctccttttgtcccttctttcctttacttgttttaagtaatttctccaagcctagcttctgcctctgaaaaatgaggccaaacaacagagtttcatgaggattaaatgagataatgtctgcaaagcttccagtacagtggttttatttagtttcaataactaatttattttcttcttacttcttgttttcttctcagttctagaacagtcagagaaattttaatggatgaaaaaaatatttgctccatcacacccctgattcatttcccagtttgggtactggttaacaaaatatttgatgttaagagttttcttcattataggatatggagaaaacccaagacttttacccacttacctaactgcgtaatgttccatctccatgttgccaggagataattcatggttgagctgctgtaaaatttccctttagcagccacagttgctccaaggtggatgattaaactgaagggctagctttagaactagagagaacttgacagcttcacagaatgtgtgatttaacataaattctgatggaggaaacagcaagaatgacagggatttcagcagaataggcagcaattactaatctttctgttaacagaataactgactgatcattaggctactgttgctgttcttgtagtctcaggagttcattggacagtggttagggattaggcagcatcttctaattccatgagaacatcctggcctgaagtttttaactgattcacaagtgtttggaaattgataagaaggttattgatgatggctcaagctacagtttagagactggctaacttattgagtgggaaaccacacatttgaaagttggtcaagtacatgaggttgtgagagagtttgtaaactaaaccgtaattgtggactctttgtgttcacaataaagttcattaaatcctttgaggcaaaaataaataccttttggaggaaaattgtccattacattcctttaagtctcccaagtacaaatttcacaaagaataaacaatattaatttactgagcttagttttcaccaaagataacctcaaaggttctaagatatttaatgatttatgtttaatctaatccttgcatacgtttgacattgtcttttcagaatgttgtaaaatagcagaaaatgttcccaagtccaatataactataatttggaaaactttcacacaagcaaaataatttcaattttaatttgaaaacagtttccaaacatcaagaaactgctggttatctcgagagagagtaactcgggaaagccagagctttactttttatcattctgtctctgtgaaactttgttgttgttttttgtttttttgctttctttgagacagcctctcattctgtcaaccagattggagtgctaatggtgactacagctcactgtggcttggaactccaggctcaagcaatcctcccagttcagtcttccgagtaatggactacaggtgcttgccaaagcatccaggtaatgtttttgtagtatttgtagagacaggatctggctttgttgtccaggctgacctcccagagtgctgggattacaggtgcaagctttttaaaaaacatgtcctaaacaggcactgactgtcacacgcctttaattccagctacatgggaggctgaggtgggaagatcacttgagcccaggagttacagtccagtctgggcaacagtgagaccctgtctctaaaatacaaaatttcaaaaaaaaaaaaaaacaaatggcacacaccttaatcccagctactcccagcaactgaggaggatcccttgagcccaggagttggagaccaacctgggcaacacagtgagactctatttgaaaaaaaacttttattgttgttgttaaacaataatttcaagacttaatgtgaattcccaaaactacgttaaggatatgtgactttcaaataccagtatttctcaaaaccatatgatataggcaattaagaaaaagtaaattttacttgataagttaaaaatttgatagtacaatgaaattaaaacatcataatatgtgaaaaggaactatcctgtcaatctctgtaaagttatagccagtacataataagaaattaggacaattaattgatagctcaagccctccctttcttgtttattaccttcttaatagtaaacctaaaatttcacagccccagttccaatcagtactgttgaataactctagttatcaatcaatacttgtgatagcaattcaaaaatataaatttttacatacatgcttaatgttattggtagtaaaattgacatttttaaggggctttcaaattgacatttttaaggggctttcaaaaatcaatatattttggtgaatataaaatttcctttgaaattttatattttagagagagggtctcactatattggtagtaaaattaacattttaaaggggcttttaaaaatcaatatattattggcgaatataaaatttcctttgaaattttatattttagagacaaggtctcactatattacccagactggactctagctcctgggctcaagtgatccccccacctcagcctcccatgtaggtgggattacaggtacgtgacagtcagtgcctattcaggaaattttttttaaaactttgcacctgtaatcccagcactattggaggccagcctggacaacagaaccagacctccgtctctacaaaaactaataaaacgtaggccaaataagcaactaagaaattatttcctgcataatggcattcgcagcaacctgaatggaattggagatattattctaagtgaagtaattcaggagtggaaaactaaacattttatgttctcactcataagtgggagctaagctatgagaatgcagaggcataagagtgatacaatagacttgggggactcggggaaagggtgggggggcaagggataaaaaaaaactacacagagggtacagtgtatactcttcaggtgatgggcacaccagaatctcagaaatcatgactaaagaacttattcatgtaaccaaacaccatctgttcccccaaaaacctactgatttttctttctttgagatggagactcgctctgtcgcccgggttagggtgcaatggtgccatctcagctcactgcaatctctgcctcccggattcaagagattctcatgcctcagcctcccaagtagctgggattacaggcacctgccaccacgcatggctaatttttttttgaaacagagtctcaccctgcccaggctggagcacatttttatggttttagtagagatggggtttcaccatgttgtccaggctggtctcaaactcctgaccttaaatgatctgcccgcctcagcctcccaaagtgctgggattacaggcgtgagccactgcacctggccaaaatctatcgaattttttttaaaaaaagaaaagaaattatttcctgtagctttttctttgaacttggatgcataattatggaagtgaagcatgcaaagaatcacattcatatcacagtgttttgccctctacccttctgtcttttatagtcttgaatagagaaccaagagaaatcaagtcaagatttttagcttctattaaacccaaataggttcattaatctcatgtaaattgatggacaagtatatgtatctcattataggttttttaaatgtaatcattatgctttcatgtattaaggtgtcactttaagcattacttcctcaagtaagtcttgcctggccacccattctaaagtaagtccccttttatgttttatttatcataacactgataactatctgatattttcttttatttacttgtttactatctttcctctttaaaatgtagattccataatcagaaatcagtaggaccaaaagtagtaacaggttctcaataaatacttattaaatgaagaaataagcttatattttttaaaaggaattcctatgaacttgagcatataatggataacttgataatcatgtttaatttatgtgtttatgaagcattacttacattccaattatttctagaattatatgaacagtctccaactagtctctcctccctttctttcaacataacatattcttaaatgtggcaaactgcagacattttgtgaggacttgtttcaataactgaacacacattaaacagctaaaataagttgtcttcaaaagcaaattgcaaacagctaaaataagttgttttcaaaaggaaattacaaagagtgactgtttccagatgtaaactactccatgagtgacatctgcttattccttcccccagtgtcagtgtccatacttgggcttgctattctctgctctctatactttccttggcaaacttcacatattttatcattttaacctaatcacaaatgtctattgatgccttccaaatagaatcatactcctatatctggactttctgattaactggatgatactgcaaactccccacttctgaaaggagttgattgtttttccttccaccctccttcttctagccaccaaagccactatggtactaagacaaaacgttaggtcaaaaaatctacatgttgttctttttaaaatgtctctatcacatgtcttctcttctttgttcccaacttcaggtttcatcaccttctcagattatttcaacagtctccaactatttccctaattccctactaggcccattgtggctcacctgaatactgattacggtgaaacttctttaaatgctacttacctcattttgtttatgtggtcatattttgtatcataacacctttaagattcactacaaacaccctagtccaacccacaatcatcttttaacaattacctctgctacataactacttttccctcaaccacacttttcttactctacatcaggggtgtccaatcttttggcttccctggaccacattggaagaataatcgtctcgggccacacataaaatacactaagactaatgatagctgatcagcttttaaaaaaatcaccaaaagaatctcatgtgttgggttgcattcaaagccatcctgggccacatgcagcccatgggccatgggttggacaagcttgctcttcatacttcagacagaatgatctgtttaaagtgtaaataaatccaaacatgccactcccttgtttataatcattcagtggctttccaccacacttaggtcaaagatcaaaaccccacaaagtctgtctccctctctaacctcatcttagtccatcctacctgatttccatatatttctgtactctaatcacactgagcttaaagttcctcaaaatgaaagccttcttcctacctgggggccttgacatgtgttgtctccttatctataaaggtctgcctgaccccttccctttgctcagtcatctactcctcctctagttaaccctgtcaaacgttacatcttaagggaaaatttcctaactccagtccttgtctcagactagttacatattctcataattttatgtacttcttcattacaaaatgtatcattccataactaattagttaattgtgtaattgtgtaattgctgtttaaagtctagcttcccgactagaatatttcatgagatagggcatgaattggatttggtttaccactgttctcccatgcttggtgcagcactttgcacacagtagctgttcaataaatatttgttgaatatatcaaagaagaaatctgaagtaactatctgtaatttctatcatcaagtctccctgctggccaagtttcaagaatataaataatctggccttattccatctatccacaaatataatcatcactactgaatataaaactctactgtcttctcattctcaaaaacgtgctgtgctccttcatgcattcaggtcatcagtgatcattttgtttttctaaccaataatgctgtttcttctaactatcttaattctacaagtctttcaaagccccgactcaaaaatgcaaatattactttctccaaataatccttcatttgtcattcatactaatttgtctttactgtggatttctattaatatactcattaataggtatcccacaatttgttagtcacttgaacctgatcttaggtttcttagagtgagctttttttgttgttgttgtttgtttgtttgtttgagacagggtctcactctgtcacccaggctggagtgcagtggtgcgatctcagctcactgcaacctccgccttccaggttcaggcgattcttctgcctcagcctcccgagtagctgggacaacaggcgcctgccaccatgccctgctaatttttatatttttagtagagatgggatttcaccatgttggccaggctggtctcgaactcctgggctcaactgaaccgcccgcctcagcctcccaaactgctgggattacaggcgtgagctgccgcgccgggtgtgagcatcgtttcttatactttttctaagtcctcttccaaggctttctatctctcaagcctacaccctcaaacatgtaaatagcccctagcacagtatattagtagaaggtaatcaataaaaatttgctggttagtaggtttaatattggttcagaaatttgtaattgatttcctcatatttatctttacctttaatgtagtaaaaagcggtatggccacttgtacattagaggtttcttttgtaattaaaagacaaaagcctaaaagtgacccagatatttagtctgaattttctgctttattttataataaagtctgttgacaatagcagtgtggatccaaattttacgagagtccagggtcagttacaatgttcatgacaggtgacttgccaagcccattatatctcccagggtatcatttagtacctttttgcatcaaaagagaattcactgtagcttcaaaaaatgcattcatagactaaaatagtaccttaataatcttgaaagagttaatgaggtcaatcaaatgcttagcccaactttcaacttccaaatcaagaacattccctctcaatggtacagaaatagaaaaggtctgcacgttttgatgactcacttttctaccacctggtcttatgaatatatttgtttgttgtttattaactcaacacttcactgtttcgttatttttaaggaccttaggatctcattggtgggaacataataaaataaccccaaaaaaatttcactggtttgagttgcccttcttacatttgttattttgaactcatgttgtgtgaaaaggagaaaaagacaaattttcactgtttataccatatttctaatttctgctccaaaatgtaacaaatgatataaattctccatgtaactcttagatttcaggttagatatttagagagattaacttttaagtcacaggagtaccctttagtaacatgagccatatctttattcataattcccaagggatttatgaactaaggagctttaaaaattggaactaatagagctttcagaaatggtcctaacttcaaggagaaggttaagccaggaagactcttatttcttgtatcattagttaaaattataagtattttaggccatttataagcagcatgcttctatgagttagatattttaatcaaggtgaaataaaaatattaaaattacttacaaaatatttttgtttggaatacattaataattctgtggtctagcacttagttcccatgtgtccagttaacttggccctatttcataactattgactattccccacatccagaataggatctcaaataaatatcctacaaatggccttgaaagctagcttagaggttgcttgcagttacatacttactcgcaaataaatcaatgatcttagtctacctgggaagggtaatctcttcaacaaagcagggcagcatcaacaggactcccatattgagagaatcagtctatctatcaaaatcaagcccttagatccagagggcaacggctgtctcagaaagataaatctcttatttaaatgtattcattctttcatccacaaaaacttattgagcatctactatgtgtctgacactgttctaagtataggatattcagcagtgaacaagacaggtaagtcccctactctacaaaccttatgagtgcctaagaatcaggaaggggcgccggggaaaatgataagcaaatgaagaatcatactcgttgcaaggtggatagaataagaaattgatgtcaaaataatttcaaattaaagaacatgctatacaaaaagcccaccaggtgcacacttttcctagacagtgaactatatacatataatacattatttagctagctaactggataaactagatagatatagatttgtatccaaatatttaatccaagaaatctttccaagatcacacatcccatggcattccctgtcccacagtgaacaaaggaattagtgtcacattttcaaaatgacagattactcaccaagataaaattgtatatgcttaataagtaggtagcttttttattatagatgtgtacataagccaattaataaagataattaagaaacagaattagtaatatgttctaaatgaatgtttaaagtatttgttcattaatttcacttgagaatgtatctatacaccaatcattcacctgccctgaattttaactatggaaattccaaccaaattccttgtataaataaatgtagataaagcaaaatagtccaataaatacttataacagaagagcaaattttacataaatactctgttcctattttatagatggtttatacaccttccaaaatttatttagaatcacctggggcttttggccaattgtctactcacacaaatgtgctaaataatagaaacttctaaaaaaattattactgttatattacatatcaattcacattccaaaaaatgttatatttcaaaatgcacaagtaaacccccattttattgttaatgcatccatatacattgtatacatgccttcataagcattccactgtattagaaaaatataccctcctaaaggtatttaaataggcagaaacactttttacaaagcaaacaattaatttatgatcatgaaaggtgtgtgtagactagagaattaatgaaaagcaaaacatcttaaacagtcttttaatgttatgaatttgatttttcaagaaatacatgtcatttattttcaaaacgaaatgatagctatactttctagagtctatcaatagtatttaaaataagatactcataactttcaaatactgcttttactagtcatcactcgtcattaaatgtaactgtatattcaagagctttctaataatagcctttaattaaacgaaggactgttagagggtttctgttgccctttgaagttcttaattattacttgtatccagcattttatggtacacttaaggttaaattaaatcatttaaatataccttgaagagaaatatgaagacttttgcccattttaattaaatctctgaatttcagtatttgaaaataataacatatgttttgatttttttttcatggccgaatggcaaaatgctcactatattaaacaacaaaaaaagaaatggtagctttttatgggactaatcgctaagcagatgcatgtaaatgagctattttctatgcatggcttccaaaagtgctaattaaatagttggtattcaaggctatgctcgctcattgtttagtgacacacaaatccagcgatgtgtgccagcagacattttaagttgaatgttttctcctctacggtctttgtcatgaaatggtggcaccatgatgagaacactagtgtaagcaaaacattgaaatatgctttaataatgttttaaccatgtagtgacactagcctagttttctaatgaatttttaatttctgttttcttataagggtgatatgagttatcgctgatgcatattaaatcatatacatgagtcattttctctaaatttgcataaaatggctaaatgctaatgcaccaaatggagcttactatatgtggtacagcaaatattcccttgaagattttctgcaatcaatctcctgtatttcattagcaaccagataaggtgtggtctgcagaataaaaaaagaaaagtgtgtagctcatgaacttatgaggcttcagatgatttctacgtggtgattagagtggattctgcaattagaatttatgtaggtaaaacacacatgtgcttcctttaaaggcacagtgcaacaaaagttctgaatacagccttgcaattgttaaacaatgaaaaggcaccattcaattattgtgatttttttacatctataattaaatgaaggaaagccatactttaaatttagtatcatttgattggcataacccttactgaaattttacaatttccctactatgtttataaaagaacttttaaaaataaccatgtgtgaaatattttgtttgctaactgttcccattttccttgtcaaataatggtgaagaattttctggactaatgtttaacatttaaaaatgttttttctatcatcaaatactcttactgaactgacattaggatcatatgctttataaaaaattgcattagggtaacagtattattgggcaaaccagagatgtttacttgaaggataaacttgctgcttactcactccactcatcaacccttttctcgtctcctacagttccaccatctggaatattttttaacccagtaaagaaaaaattggggaaggggatggctatttaaaaataaatgctttgccctacagttattttgaattagtcttgataaataattaaggaatccataatacattatttagatgccatggtcttaagaatttgagtggtatttcaagtacaattatagtcatttatttatcagtagaaaatttacataatcacacttcaaaatccagtggactggagagatatcagaaagacacccatgaatgtggtaatgactccgagtattagattaagttaataatgtagtgatgcacatgatattctaatatctagcactacagtatttgatcacttaaaatgataaaggcataaatatttttctcttttcaaactgtattttatgcagaagggctctttatagtataaaatgcaatttgaaaaatcaaaattgaattagacaatctctaatgaaataaagctagttaacttttaataaataaagccaaaaaattttcaatgaccatgaaaataattttattataacaataactattggctaacaagaaatagtgttcacttcatatatttttgaactgacaatatagacctttaagctgaagtccagaaaaatgacagaaattcaactcctctttcctatcattgaacacggcatgcaaatggagggattacctattggaaaggtaacacactctctgttagctcagtcatgctatagattcttccttagcagctagtccatctgagacaaatttggcagaagtatatgcagtatttgtactgtgctgtttgaatcactggaatcccatgtcatacctgcaaactgagattttagactataattgagcacgagtcttcagtgtggaaatctaagctactcagcaatttttaactttatttggggagagctaaactttttatttttatattaatctacgtacctagaaattgtcataagagttactttataaaacaatgcaaatgcaaatttgtcaattaattcctatatccttgctgtctaggtattttcgctactggaaccactcaagaggtatatattacaaaccccaaagatgaattcctatcagattatttttcttccatccatttcaaactccacttgccatgaatttgtcatacattcattgccatgaatttgtctaaacagttttcaagctataccacaaaccactcaataccctcaacttcatcttcccaatatcagtcaatgctaatttaactttgtatgtacatcatatatttcaagggtaactcaatccattaaagtaatatatattgggtagtgactgtgtacaaactatgtactttctaataataaggcctaaaatctattatttgagctcctcgcaaagactattatatttatgcaagtttcaagaacttataatgctcattgaattaaaaataaggactaagtacacttttattattactatacaagagatttaaccctgacaggaagtaagtccatagattctgaatttcaatgatattacatctattattgtcttcatgaaggtattatgtccaaatatattatatgaagtatttttaattaggccagtgttgataaatacgtaattatatttgagatacttattcggtgaaaatatttctaaatcatacttgttagaaatttttccatcccagtaaatttcattcatatgtatacatttgtgtgtgtaggaagacatttttccctaaaagacaaagatttaagagacattctgggtaatattctgtagatcattttttgtggcctgattcagagaaagtatttattgtctatcttttttttttctttacgcacatctcttttctcaagtggttcctttcacaggttttcaccaactattaaagtgattagcgtctgtagttttttccaatctcccactagctattaatgatataataaaaaaaatcttaaccttgtcaagtttgaatttaaaacttaaaaaagccaagagccaggttgcagttaaaattctcctgataacttgttttccgagggccagtgactattaaaagaaactcagagaaaacacgaaatctgtcagacagctacttagtgacagaattaaatgaatattgttaggtaagtgttttaataacgcagcattttcgaagcattttctgaagattatttctcattggccctgtcataaagtggtagcaaactgctttaaaacagtaatcagaccgaaagtagttgaggaagcctatgacaggaagttgttaataatatccttcgaaatttacctgtgaaatacagagcttgactacttttgtaaaagtggaattgaaagtaaacggcctctgtaatgcaaatcgaccagcagcaagaaagccactacctttggagtcccacgacttcacctgagcttgcaatagaccttgtgcgccctttggttcatggaatcaaaactgttttgacatgttggccagtgcccttcggtgtcactgaagctcagcccgcggacggcggtgtgtcagtgtgcaccgggaggcctgggcctcagtccctgggctcgtgcctacgcaacagcaggaccgcccgcggcctcccaggaccagtgaccgtcacccgcagtaaggatcggggcggctccgccagtttcggccctctttccaagacctctttccaaggcgctctttcctagcctcacccgagggccgcagagccggacctgtgccgggcgagttggatttagcccagttagagttaagatggtatcattagctgcgcacagcgtgacttcccgctaatcctctctgcaacttacaacaagtttaaatgtccatgcatgatgttattaactggctttagtaagtgcttaagacccagatctctttttaaagtaatctctgaacaagttctactgtatccacccaacaaggagattaatatttccagcaaatctgatgatggggtaagatgtgccctgagctcctatgggcaatgggggtagaagtgggagttgccccagggaagggcccagagtggcaagcgctcaccaacgccggccaccgagcaaaacttccccgcccccgccccccacccagcttccccgcagggagaccctttccgttagcagcttttcactaagttaataacggtgtgtgtgtggtggtggcggggaggggggatttgggggttacacaatatctatatcaatgatattgatcacgtccagggaagaagcctgggcaaaactagagacaccgagtgtcagcaaaagaaagcttcttaaccacaagttgcgtgccgcctgaggaaggtgccctgtggcagggggtggccgctgggagatgcctgcctctaaccgacgtccaggcgtgactaaacctcgacgccacccccattcacaagctcaactcagggattcccaagcaaccgcagaccggaggtggcgcagaggcagtgaccgaggtcgctgattaggggccgagaggctggcaaataataattttaaaaaaaaaaaaaaccggaatagccttcgcggacgcagctcagcgtgccaggcaaaggacagtctgacgacccgcccctgccgagccccgcagcgcggcgccggtgtccagcagcctccaaggcgccgagcgcgggcacgggaacttgagctagcgcaaacttgggcggcctcccagcctgctacccgggccgcagcgcgcccccggcctcccagtcgcgcgccaacccgggagcgcgcgcgccggcgcaccagctccatcagctagaggagcccgtctcccgggaaacaccaatcagacgcccgctttcaggcgagggccgcgagccgcagcagctgcaggaggactcgggcagttggcggtcaccgggaggcgtcgtcctgccccgcggcgggccagccgccttcgctgctgccactgcctagcctaaccgcatctgcagccagtcacagagtcggctgtctcctctttgcaccgcccacgccaagtaccttgcaaggcggctgctaagcctggctaattttagatctccagaatgcgctatgcccgcgctcaactaaaaccaagtcaaaccatcaagcacagtgatgtgctgctttttgaacaaatatggctcaaaactccgtatttccctgaataaagtcgattatctgcactttttaaaagccctaccccctgtggtctggcagttggctgaaaagcggaaagccacacgctcccacctcaaacatggtcatcacctttctaaggaagtgcactaactctcgcagccctgattgagggcagataaatattccttaatatcaatcacaactatatactttccatttccattcaccatcttagaattaattccacaaataagtcgaacagttcccagaaggggtgaaatgggttctctgagcaaacaggaatagagggttctgctgatttctgtactaggttgtttaagttgtgttaagaaccgatgagcaaagaaacagggttaacaaagccatccattaaaatccagagacactgaagaactgccttacatgtcccaattgctgtaggacctgtttaactatctcgaagtagtcatgttaaaacaatcgacccagcattatagatatcttttttactcaataactgattctaattagttcttagtcttaaagaacaccttgtcctgtgttgcccatctcaccactgccacccccagttcccactaaatgcaacatattatggtgtgttttacttaactgtagcacattagggaggaaagggtatcaattttctgaaaccacagtgacatttccagatgtatagattcataggaaaaaaatagatacatagacagttacatactgtcattcattttctagccacattggaaaataaagcctttggtttcatctctccatttttgaaaagtcaaaattcctaaaatgctaaaatatcttaaaatatttatatgtatccatctatatggcttccttataatttaaatggtttcttaattttcatcaggctacacaaaaatcaaattagaattttatatttttccaaataagaaaattattttaattttaaaaataaacacaaagaactcttgtggtggaaaatttactgttcaaggtgacctaaagaacagtcactttggaaaatattccattttgaatgtaaataatgcatgtctcattattatgcataatagcaacttcattaagggattgatactagtgaaaatacccattcacattcagcaaggacactgaagaagtcttcctgaatcttttttttaacctttatccaattttcatttttgttgttgttttgtattttttgtatgactatgtttatcctatatcctttattatttgattagtgagtgacttttcaatgttaattttctggtataacaaagtagggtaaagaaaataaatgggttctatctttatatttacttttacaggtatcattttatcaccctatttctaagtatttcatgaaaagattctagatgtcaaaacctgcagttaacgttcctgtttagaaatacgcaaaataatacctttgacgttggcaactcagatgtattattcagcaaaacagcaattactcattgttttgcacttacatgttaagaactatgagacacttggtgacacaataacaaaattgcaaagtcaattacatttaaaatagacatcctagtaaaacatacacaaccaactccatttactttttttgaactgttttgtttcctttttctgactgtttacagtcaaatagatttcgtgaatgttaaaccgaaggataactgatttacacacatcatgagggggaaaaagttagaaagtagggggaggggcataacataaaaaggaagtgtattcctgggcacgccagaatccgcctagggaggtgccagaatattcttaaatattttgggaaatgatgttcttttgcaatgtcaatcacagtggcaaactttgaaagagcagtgtgccataatttaaagcaaaatttaagctagattcacactaacaattctatgcaggactaaagtagtaaaacccacatagagtccatttatatttaagaatagagaacttcaggtggggctaggtgtttgttttatggtattttaattgcagaagcagaatttttgtaatttgaactcgccagtactgaattccacctctcatcccagcctgaagcctgaattgaagttcccatcagaaaattaaaatgtttgtctggataaaataacttctaaatgaactatttcttttcgtttctttttgtattttctgcaatgtagcccctcgcaatgatattagttctagtgtgggaaaatattataattgagatttggtaagttatttgcagacttttctttacagtttttctttacactgtgctgacatttagtacagccctggtgaggaaaacaatactaccattcatagctctagacgtagatttcaatcgacttaagcgggcacaatgaaacttggtcattcactggttacccatattgtgttctcaaattttctctcagcaaaagtataatgactcagtattgtatggttgcatagacaagggctcggaacaagagacactagttttgtctgacggtgtgagaaagtcgtgaagggatcttttcttccagatggtgttaaattcagctgcctttttaacattggccttgcacagcaatctgctgctcccctttcacaaagactgcacttggttcccactagttaacatgcatactcacgcaacctgcaacttcactccaactgttttacaatgcagtggtatgctaaataaacttgatccggtttctgccaatgttaaaactaggtttcaaagaactacttaactgatatttacacttcttttgacttaaatgtacatgcctttggaatattacgggtttcaaagaaatatcaccttattataaggtcaatgtacagattatttccaacacccttcaaacctatgctcagatacagtacctctcttcaacacacacaaataaaacaaaatgtcagaagtttgatgtgtaatagaaaaaagaaaaattgggacatgttgcaccaagggcagtggaacagcaaaaaataaaatgaaaataataacattgaaatgtatttttattgatcgataagttatgtaacattagtatgatacaaagcaagtttgatatgacaatggcaaacacataattataatattgtttattttccttagatgttatatttaacatatttacataaaagaccaagatgtaggcaaaagcttcagtaatttgacttcattgagtgctttcagtaaacaataggtttctccagcaaacatcttattgccttaattgaacctccttgaaaaagaaaaccacacactttgtaatgtaaatgttaattgtagtagacaatggttctaggtaaatagcacccctggacatgaagtaaatgaaaggaatacaggcacttaacaatgaaaggttgtttgcacaaacagtgcttcaaatgtaaataaacaagggtcttctcaacggtcactacagtagtaaaactctggcacgtgtacagcagccaaattgagaatttatgtataaagtctctcagactttctaactgaaactaacagtggtttaacaggcttctccagtctgaagtcatataaggaattgaagctacaaaggaaattgtactacttttaaagaaaaattgtatatttgggattgtcaataatctaggccacgtggaagataacaggctattttggatattttctaattgcaatggttatatttctgtgtaaatgcctatacaaatgtttgcttggtgacatatggaaaacttaaggacttttatgaaaaggcgacaatggggacctccaaagcgccaaagtttctgctaggcatagtgttatttttagattacattaaaatggctatttagacccatctagctgagactattccaaaacaaactttttatcatattgttatcataatcaactttctacaggctaatgactttatagttttacttctagtgtatatctactagcacaattagaccaagttcctagatgtatcatgttaagaggtaaaaagcctcatgaaattataataacgactgttatatagagatatgtattttatctctatacacatttgcccacccaaaacaaaagcaaaaatgtggtcacaaggccataatctcatggactgagattttgacattaggggcaggcagtcatgggactttcttggaattgctttctactagcttgccttgaattctgaaaatctcaaacaacgaagaaagccaaacttaattatggccagattaaacagtggttaaaaaattaacagaagcagactatgtagcagctacagaccagttggtgctgccatttgggaagctgcagatggctgtgggtgggaaatgcctttactttcttaagcgatggagatgagtatggtgtgtgcacttgatgtttttttcatacccccaccccccaacagggctgtctgtcataggctgcccggccccgctttatcacttgcccccgagcgtgggaatcggagcgtcctgccgttcacatctcctgcattccgtttagcggaatcaattaggcaagacagaccctcagattccccaccccctttccatttttgtcaggtctatatacgtcctaattatttcagtttgggatgccagagctgtttcctggatagacctgatcatccttaaacaaaaagagaggaggcgcacacgtgggttgtggcgtaaatgtcactttcatttccaatgctaggcgcagagtaagacagaacatttttttaacactttgacaagaggggaggcgatctcgtctccatcatgtctttctgcttcagtagcttcctcaaggaaaccctcttggaacagagaagcatctgtccttgtattttgaatagaagaataaaaatcagcccttgcttttttttttttttttttcattttgcctgctagctctaagtcctcagtagatacaaattattaaccttccagtataaacttttctgaaagtctaatttcgtacaaattgacatacagcccaaatacatgtaaagtaatttccaagcacaatcttcaaattttgagagggaggtgcctcccaaaggaactgcccaagtctacatattatggaatcatttttaaactaggtaccagacatctctgcaacacctttctaagaaaaaaatccctgatataacttttgccttaaaatagaacaaactgcacatgcatctttactcattatcactatacacttctcctttgcagctgcaacaacccctctcaagacatatctggaaccttgatattttagcatgtgtgtgtcatttaattttctctcatcccacctttaatcataaggaaaaaaacaaaacaaaaacaaagttagattcaataagtattcctgacctttctggtttttactgtctctcggctgtagtctttcattctcacacgctccccggcgatcttgaaggagtttttactttcggttatctagctttatgaagaccaatacactcatacagctagataaccaaagataacaactcgcttcccacacaggcctctgtcttcctcttgccagactccaggtcctgatcctttctggcagtaccgaagagtggtcgtccaggatacttgccgcgcttaagattcctccttttatgtaaatatgacctggtttctgtttgtgtgtgtgcgcggctaaaacatccaaacgagatctgttgccttcagagtttattccgaacttttctttttcctttcagcaagtaatctccggcagcgttagccaacaattcatctattaatatcagaaaataaaaccagctattaaggtgcagcaagctgttacgagtgagcagcagcatccgtcccttcacaggcctctatttgcattgtaaattgcttctttctcacgcaagactctttagcctctctctatagagatgtataaagccaacggcaatttccagcgcaggttaaggaggaaggaaaaaaaaatcccattctatagaagtgacagctgattcaaggatctgttcctgatcctttttggttaggcaccatggctttttaccaagcggtggcagcttgattgcacatatcttgtgtgtatgtgttttagggggaagatcctcgatttcacagggcttctaggctgggaaggagaagatgccgtcttgctggcctgctgctgcccccggtctgaaagaaggagaaaagggccatcattggaggggctttcactgccaaattgtggaccagcccggcaaggtcaaaggttcgagaccgcgggagaccaaggtaatgatgatgtcatgagaaatctcaagtacatggttattgatatgcatcagtgatcagccaactgccccacgcctgctgcccgagcagcggcagcgacagcagcagtagcggcagcattgcaacaatccctattttctcaatcaacatctcttccgctagcactaccgactgctcctggaaaagcaacccgcggccttttacctcctccgtgctagtgtagatcgttctagtatccaaagactggaagaaatctctctctaaggacagataaaagcatttcagatctggggaacgtctttgcctgcatttttcttctggcagattgcataggcagacagatggaaggcactttgctattgcttaaagcagggcctcgttttctggggctgggaatcagatctgtattacgcagtgagtcgatgtgtgattacattgacaatttgctctggtggtgtgtttttaatggcttcacagctcagtcatgttttgtatctatgtaccatggcgatagggcagcatattttgttctgtaagttcgaactgaatgctctaagcaagcggacttcatcgtggtttttaaaaaatgactacatatgtagggtgtgtgcgttagaatgcagcacaggtaaaccttgcagcaatagtttctaatgctgtacacaactctgctgtaatgaaaatcctgagcctttgtctattgttttaaacatcaattttcatacaaaaggataatgtaatagtcttgcttctgaaactatgaaaaaaaacgttgttacctcgtgaagaacacatataaaacacctggatgttaagagcataactctgccctaccttccccttctccaacccccacctttcttctatctagaggggaatgttgttttattaattaattagcctcattccttttcttagaacttttcaaagtgtgaatatgatcacttcaaagagtccttttcttcttctctctccttagtaatgagtaatctatgtctaactcatctataatacatgcagttgtaatattcaaatgtccctcaacagaacatctaagatagtctacattaaattcatatttaccaagggtgaaccttatgaactgcttttcaaaatttcaagttatgtttggtcatattgctattctttaaaatatatgctattagagtaatcttaatattcattgcacacatgactactttatcacaatactctcaattctatagattattttccccaacaactaaaacacttttggaattaacatacactctttcattaattcagtgacttattcatttatgacatgaatgtgaacatgcttactgaattatatacagagcacatatatgtaaaccctataaaaaagactagcaagaaaatcagaatagttaggaaaagcttataatcaagagtttaaactacaatattacaccaattaaagatatgatttagtaacatagatgccaacttttccctagattttttatttatttactttttttggtgaacattccagtactgattatttagaaaagactaagctgttgaaattgttcatctatttttcttaccaaattatggtacaagaggtacaatcagaaatggctgcattgggttatacataaaatgcacaagcaaaccaaaaactaactcagagaaacacacctccatgaagttactgttccttctcgaactagctggtcacaacatacactactaaataaaaatgtaacacatcactgaggcacattccaccttagacattacataaaacactaatgagctctgccgccttggaagagtgagagtattgtggccttgctttccaagacacagatgcagaatcattagtgatttggcatgtattacataaagcaagcatgtggtcagatgacaggtatttttagaatatctttttgctttatatatacttgggtgggggctggtggaagcaaagagatgtcatgcatttgtctgtgcatgtttatcacccccatatctgtgtgaatttgcaaagtaacatggctatatttccacacttagcaactaaatgcatttttagaaccaaagtatccatcatgaaagccaagacactgaacatttgagatgcttttacaattaaaagctatagaagatactgtcttaaaacagcatcttctagggcaatgccacatagtcatatcaactggactccgggcctggtccccatgtctggcatatataacatagactcatcatgggagtcccaataagtgaaaggaaccaacattaggattatgagcagtctgttcattagccagatagccaactaaatattttactctccaccatctctcaggatatgcagaaataaaaactacacagtaaggcttaacacagagcatctgattattttgaatattgccaaggtttatatgatggtttatacatatttcaaagactgtattattatataggatgtgagacaagttgaaacaattgtgtagccctaaagattcctagcaatgtctgtcacatattaagagcaactattaacacctacatgttatatcagatatttttgctttcaaatagctattaagctgagcagaataccagttttgaaatctgcattctgaaggatatactgaatttaaatggtttgcctgctcattcactaataaattcccattaatggccagtagattaggacgtgattgtcatgcttgttttctaatctttttatagatctccagatggctgaaacatgaattgaaacattctggtttacctgggagtagacaatctctatttcagttaaaagtgaaaagttacgttttccacattatttggatcagaattatgctatttcataaattcaaatacattaggtttgtcaccatatttagaacacctctgaatcctattcagattactgcaaagcacatgaagaactggcctatcactgaaatccccttttaatatttggtttgtatgattcaaatgcatgtaaaccacagtgcactagtacagtcaagactaccattttctacataaaagccatttaatttacagtgatttgtatagttcaggcaaggtacctgactggcttactttctaacaaaagtattctattatttactctgtatcttgaatttcttttttataggcagttacaggttatatttgtattatgcttgatatataatatacaaaggctccctgtagaggagaaggctgcacatatagaaacttagagcatgaattaggagatatgcaacccactgcatgcctaccgcctagtaaataatactctattttgtacatcacttggattttatcaaatgtaaattttaaaattacctttggttggttggattgtctattcattttatgcttctttgcagtctcatctgaaaaatagtcaagaaaacaaatgatcacagtttatatatatgtatacatatgaagtcatatagatattgcttcatttaaaatattgctattaacatgattccttaaaatgccagagattccataaaaccccagtacaatgtatcctaggtctcagcacccacggggttaaatatgctaatttgcattcaaatggagacatgcatgataatgtgaatgcaaaatatgcagaatctggaggggtttgagaaattaatttttctttcttcttttcttttatttttagcttggaaggaagagggactcttaaaaaaacattagggacttgaaccttgtaacctgccatacaaaagaggagagtccttccatgtaaggattttaagtctggaacaaagtcttattttctaaatgtttaaggaactgaatttccaggcctttcgaacaatggcaatccctggataaatatctactccattagaaagatgcaaatagtttactgtaaggccacagcaccgtgagatgtgcattcatatctatggctcctgattggctctttcctccagtaaatcaatgaataatgtaaaacctgattgctgtaaagtggtggatttttgaaaatttcccttcccccattccctctcgatccaacattcaggaattcaatactccccaaaataggttgtttttcttttatgattttttaatgcttattgttattttggactggaggggtggggctattggttttgcaaaatgaaagtattgccctggtttaattatgctgactgtgggagctcgcttcctgagacagcgccctaattaccggtgccaaggtggagaaaggagggtggtagacagaggtggacaccaagaaagggaggaaacggaacccgactctgcggtgctgggcccaaggcagccacagctccaaaggggcccccggccgtggccgtgacttgacagagcctccggtctaacttctgatcaattccactgctctcctgacccctcaagacagtcccccattcaagcaccgcgggtacatttgcaagataaaacgccgcagacactaatgcaaatacattgcccgagttcccatcaccctgggttcctgcagataattccaggccacagaaaggagttcttgccttcctcagccgggtctagactctaagcaaaccgcaaagacctagctccgtttggataccagaagcgtcttaagctgaaccgctccaagtaccaataactaaccatgatggttgcatcttgatgaatctgaacttgggataaccctgtaaagcggcctctcacctcccaaaattcaaaaggcaaagagaaaagggaagtggaaagccaccagatctacttagctactgtactaagttttccaccaaaatctaatcagaccctcgcttccttgccaggtaattgcaactttggggcggttaaagggaggcgaattcttcaaaatgcgaattcgaatacagaagtgcaaaatacaagtgcattttgctctaggtttaaaagggaaaagcccccccaaacacaccaccaccaccaccaccacaaaattacatacaaaaattcccttttccaacgcgaagatttcctggcatctctctgcgattgggggtcaagccgctggataattaacagtactggctaagaaaactcacgagatcaacaggtttaacatccgaggcacacaatcaattagctgaagcaaagccccggactggccctcggagcggcccgcagcgggactctgcgggcaccggctagcgggcgaggtgaggagtgcgggcgcggggccgcggcgggcactgctggcctcgcgccgcgggcgagctgcagcctgagggccgccacgatactcacttgatctccctgcgccaggcaatgctgccccccaaatccagctgggcaggaaccgaggcgccggctgaaagacaagatccaaagtcacagcacggccgcagcacacaaacaggcttctttcggcgtctccaaaaaaaaaaaaaaaaatgtttttctcatcattcctctcccctgctcaacacatttaaaactgccgctcaattccacatggtgattcttggttgattgcgtctaaaatagtttaaatgggtcttcccttctggggagagggagaagggcgcaaaagaccaaggagtaaaaaaaaagccaacttttaccccccatgccaggcacttgctccctgagcctcggagtggagagtgaagtggtgtgtgcgaggcttggcaagtttttgggggggctgtccaaggtctagtccagccccctctgccgaggaggacgtgctctgaaactcaaccaatttccccactgcttttgttactgatgaactgaagccctattgttcatccattgccacggtctttttcagtccccacactacgttctgcgttgccagagataatgaatttgcacccaaacctctcatagtcccctcctgacagacggaacaaattagaaatgtctcgtctgaaggaaggcaatggctacattttcctattgtaggatgcaaagcacacatttctttggaaacttcttttgcttttttcttttttttaaaatccttttcttctctttttcttttttcctccagtttttttttctctctcttggtttcttaagattcttcttttttttttattacagaatctccctgtcgtttttccaatgcactgttttatgtaacttgtgagtcttcctaaccttcttccccttctttcctctcctttcttaaggactccctttgcaattttatttacaaacttggagaatgaccttttgactcgcagacttttttttttttaaaggtcttttggttcaagtcccccttcttcactcctccccgtttgtgtcgtggttgttaaatgtgtttagctaaagacaagcaatgcattctaaagaattttattctctaaactctagaggtattctaaatgtaccagggacgcgccataggggtcatctatttgaggaggaagaaaaagcgggtgtgtgtgtgtgtgtgtgtgtgtgtgtgtgtgcgcgcgcgcgcgcgcgtctgccttccacggaaagagagacggagagatgtgggagggtgggggtggaagtatgcagacagagaagggtgggggcttcgaggggaaggtgggcttcctgcaacacaagcggagaggctgtcaggggtgtgggcacgggggtgcggggaggcggtgcaggaatccgtcccgccgagtgccgtcggcccctgtgggcctgtttgcgcgcctggggctggccgcattctgggcgcgggtgtctgcgtgccggggtggtagttccgagcctgcgcgcgtgcgaccgggtacgggagggggaagagtgccgtaaaaattcagacgagtggcccgtatgtaaatgcagcccgcggggagcagggaggcggtaatgacagccgctggcgctcagccccgccggcggcccctagctttcccgccaagtgcagccggaggacagacagccatgcgtgtccttggcgggagagcccccacccgccgcgcgcgcccgacccccgcgcacacgcacacactcccctcgcaggcgtggggcccaatggccacgaacatgtcaggaaaacaaagctggggctgcgaggtggaacgatgaaacggcacacttggcggccgagggcagagcggagaagtcgccaccacagccaccggcgcccctttcttgcctgctcgtagatctgccctccggcccagaagaggccgaggaccatttcttagctgccccagaggagggggcgagcagaggagggggcggatgtgcacagggaggtgccagcggtccggtgcgcgggcacgcacacgccggcgcgcagggctgccgcgggcggaaggaggggaatgacaaggcctcggccgcgtctcggagaggcactacctccgcgctgaggccgctgagtttcaagtgcaaaacaccaggccaaatccggcaaggcggcggctacagaatggctcacacttcaagcctccttcctcaaacaatccgatgggaaggacctggctgttcaggggaagcctttgctggcctctctttttacatggggtgaagtcgaaccccaatctaggagccctggcctagatggctccgcagatgagtcccagacgtggccatggaaagactgatctctctctgctcagagcgcctgcctcggtgctcactagcgcaagcacctcccaacacacatacatacatacacacacacacacaacacagcactcccatcacattaaaacgcgcgctcatgatcctgccgttaatgaagccgaggcgcataatgagtgcacaggtaaataggtaccgaaaccagaagacttcaccagtcggctgggcgatttacctctccctacagggagcacttgtagttatcgtgttttaggagtgatttgctgttgtctgtggtctctcgctcctcttcttgtggagagaagccaaaaaatatatatgttccgtggtcagagtcttctttctgataagctacccgagcattggtctaaaacatctgttttatctgttgattttggtttgttgttttggggagtgttgcttttctgagggaagcaaaagaacgtgtgtgtggtggggctggaagctcagggcaagagtctgcgtgtgcggccggaaggctggcgagtctgagagccgcgcggtgcagaaagaaggcggcggcttgtcctcccccggggccggcactggtcccttggcaccccggcctgggctcggctactgccgccgccgcccgcgctctcgggctccgccggctgccgctccgtgttttcccccatcccggcttcacgttcaaggtttagctgcgaggtcacgtccattgacgtcagctccctgtctccctctacgtccggctacatttacatacatcaaggaaattagggcattaaaaaaatatgcaaatcctgcgcgaagaggagcgggtgcattcctggcgcgatcgccttttattgaagcttttaattaaaggggccagttggcgagcccctgaaacaaccgccaaaaccccccaaaagagaaaaataaacgctgtagccttcgagaacggttgtttcggctcctgttctgtgggcggctgaggaccgccggctgcccggctcggagaagaacaggttagaggaggcagctccagcccatgcataatcagggctccgcggcgcctccattctttcctcctcctcctcctcctcctcctcctcctcctcctcctcctcctcctcctcctcctcctcctcctcttccacctctcctcctcctcctccttctcctccacctcctcctcctcttcttgctctcgctcctgttggttccagcgtgtattatttttaatactgatgcatatgtaaaggtatatttgcattttttaatttgcgagaatttcagattttgtcattttattggttccctttccctctttttttttttggaggatttttattgttgttattttattatgtctatgtgtctctcttgtccctttctgtcttttttggcgagtgtctgctgctgtctcttgctagataatatacacagttacctccctgcttctgtttatttaaggttacaaatatgcacatctgtcatgtatgcaatgccagctgtataacctcctggtttggtcataaaggaaaatacacatttttttttctttcttgacataccttgatgggctgtagtgcccatcgctcaaggctcaaagtttgattgtctaattaacttcatattagcagaaacacagttcggggccagtgctttcgagataatgtatgtataagtgaagtgattccaaagatttctaaataatttttgtgctgattgcctgagaggtgcggcattccccgccctattgctttctagcatttcttattgaaaaaaatatatatattttaaaatgggtagacacagcaatggacagccttctgcaaggaagacattttcaaccatgttgtatgttgtaccttattggctgcattcaaaatttactgagtttcatttttatcttaatatggctggaaacaaggcacattatcttgactgaaaagcatccttgattcctgactttgaaatgaaagcaaatacacaaataaaacaattggctatattaaaccagttgatgtggcttaaaatatacaggccttgagttagatttcaagcaatggtaatcttgtttataggatcggattctctttcttggcaatatagctatgcagcacgatggcttttttccaccttttaattcccccaagctatcatttaaaaaagactcaatctataattgcaaaccctgaaagaacagcaagtatgcacacatgcagcttattcaattaaacaagtccaagtacatgcacaggtaattagttttcttatgaatgacttacctgcacagatactcaggccaagactcagccctccccaatggccttcatgtataaatattcacatgtatttccccctatttcaaacctaaagcggtatgccatctttcatgctggactatccagcatccattttcagcacccttaactcttatggaatttccagccttacctctggctgtagtttttccaagcctacaccaaagtgctcatatgatatgtcacccaataaaaagtggtcagatggctacacgtatgacattaaaaagcagaaacacattcatccttcaggttcgcctttaccttgccatatatagcaagattacgtttcctaaaatacattttcagcacattttatgaataattgcaggattccacaactgattgcagaatagccggtttctggggggcacctggctgagtgaaacaattcggcaggctcaaggtctctttgagtttggctgcagttaaattgcgcgtggctgtttgttcctgcctggactctcccacatacctgcctactttatgtaggatcaggacaaacacaccggccacgttgcagggcatagagtgtcggtgcatatatttagatggcagtagcaaggaacgcgtgcgtgtacggctgagcatgcatgtgtgtacagatgcgtgtgtatgtgcgcgcgcgcgctatgtgacaaggaacacagagaggtacacctcttatctctgatctctctgtaatctccttttctgtttctaatctcccttattggcgcatggtagtaacccaaagcgtgtgaaccgtcaccgtcgctgccgtgtgcgcgctgtggcttaccccgagggccggtggctcggtgactcgctggctaggtgggtgttggggaagagggtgggtagcgtcgctgccgctgccgccgcgggtccgggtgctctgtcccagcccggcagccgagcgcgcagtgtcggagccccctcccaccccgccctcacccccatcctcccctcccctcccttctgcgcctcccccaaccccccgccccgcattaccatatggaggccgagtccctgcgaatcacagcagcagcgggaggtatttgaataagccccgcaaccccgcgcagaccccaactcctccgagagcagcatgccctgcaccaagagccaccactctggccggtaacctggcagcgacagacaactccccaaagtgccctgcgcgcggtggagagagggtctgctgagggtactgggtctcccacttgctacttttatattaacttgacatagaatcagacaataaatgagaggagagagaagagaagaggaaagaagagacagaaaaagggagaggcgctgtaaaggggagagagaaaacagaagcgagaatgggagagaaaaaggagaaagagaacccaaagggttgagttaaagagagagtaaaatggggaccgggtggggaaacggtgggagggggagaaatacccaaatatctgaatttggacttctcaagctaaaaataccacctcactgaacttcacaacctccaatgagacacgtgtttctcccctcaccaccacgtcaccgaatgattaatttgccgtctcaatcagaaataattatttagaattgtataacagatataggacttagcagaaagaagctcattttatgaaacatagcgaaaaatatatgacatttaaagatgatgttggctacctcacggtaaaaattaaggcttgccttaacgactcggcagttgtccaaccatgtcctctgaaatggtgagatggcggcccagggccagcaacaagaggtgttccgaaatattttggactttaagtgaaaattttttttcttcctgtctcaaattttattgttacgtttttcttcttcacgaatttattccttttacctaaattttacagataatatgtgaatcttttaaaaaattttactgcaaaatgtcacattttgactgaagatatgattttagacgttaatttaaacacatagccagttccattttgcaaactaactctgaatagcacctgattctgaatttagccaattcaactcactctccctctccctatcctcaaatcagagcagtgatttccctgtacaaaacaatcagaatcatactaaaatctccagtcacctagaggatgtacccattgtaaatgtccctttaggtattcataagccaaacgcccttcttttgaaacacatacaaaaagaacgcctctgattaataatctctttcgcggcacactgaggccgaaggcagggagccgcaggacgccagagaagggcgcagaattctcaatacctagcatttcaatgcagattccaaagattcgctaactgctaggttttccaagaggaaataatatttggcaagcaacgcttttgggaaagacaaccacattccaaatactggctccttcctgggcctggggaggggactgcgatcgcggttacccggcacttctgtgttcatgtgtgtacaaggtggtatgtagcccacgcatgtagccaggcctaggtttctttcttttctttttcttcttctttttcttttttctttttcttttttttttttttttttttttttgaggcaagaatattgaaaccaatccactctttctgtagctagctcccacgaagctgggattttcaacctcttgtttattcgtaaagcccatatggaaccccggttgaatctcccctcttcggattttaccaggaggccctcagtgccccaccgccgcccatggcacgtgaagagaaaggagggagagttgggagccacgagagaagccggctcggagccgcttccgtcggggcccatgtttcgccccaacagacccgtctctcctttctctccccgaaggtacttccttaggccggcagtgtcgctacggtggtagccaggtgagcacgggcacagtcccggggcgggggcgggtagagcggccctctctcgggagctccggtgggtctgcgaacctgccgggagcggaaggctgagtggcgctgggggcccgcgcggggctcctggctcccgccggcaggggaacagcgacacctactggccgcatgggtaccgcgcccgggccgtcagggctgccctgggacggggtgccgggctccgtggacttgggaggccgcgggaaacttcaccgaaggctctgcggactgctctaggactcgtccgccctggagaagacaaagccacgctttctggagacccctgggaggactgtaggatggaactgaacacacaggcacacacgcatgcccattttttctggggaaccggataaaccctcagatgcagttgcccaccgtcccttggttttatgagagagacccaagcagaggtcggagccttgacctcctcaggttcatgacccaggcctcttcaccgcctttcccagttcagcactgactaaagaagatatctttacaaattaggaaaagaaaagagttcattatcctccctgaagcggggaaatgagtgagtcaaagacacagactcacaggcagcggttggcgccgggcacacgaaccggccgagccctcctgctagccagcttcgggcacctttagtgcgccctgagactgccgccagggagtgaaatttggtagctcttctttaagaattacaatcttcttaattactcctgaaataaaggcaaatttgggctactggtgatatttttgagaactacaggtatatatgcatatataaatatatatatttaaagcatatataccaaagcaaatatatacataaagtatatgcatatgtgtgtgtacatatatactcacacacatacacatgtgtgcatacatttacatatatatcttctgcgacatggcttcggttgttggcttatgttggggaaggtaagaggttgtgaaggcatggcaggtctgatgaaagctcagcaaggttggggatggcaaaaaagcaattcatgtattccagattcactttctcttatctagtcttttctgtaatagcatatagccatttcatatgggaaggagatgtgatgttggtcccagcagcgggtagaggaggggggaacctcagcttccattatgccccaagatgccttctttttccccttttcaggttctgaggctcacttgggcctaagaaacctggctgagtgtgattcttatactaacctgctcaaaagtaaaacatattccctttcctcgaaacactggggtatcggagctaatttcattccttaagatttctatgtaaaatattgcttattaacaaacctcagaactaaaggcagtttttttccattcaaatttcaagagttcattttggaaattatttttcttagctttacataccggttagaactagggtctaaaagattttgcctggaaggtgggagagcttattaggactaaatttttgtcttcgttctctacagtcacaaaagtttgctaattctgttttatttaaatacaattggaagcttttagtgtctctaaagccaggagttttaggtcaggtccccctctctctccctcttaaaaagaaatcactaaaaggcccaggaaacctgtatttcaactctgttctgcaagtattttttttctttttaaattttcttacaagtggatttgactgtgtcctgataatacaggaattcacatcgaagaagagactcttagcagtttgtatgatatacaaataaacctatattattaataataaaattgggctttatcctactggcattttttcttggcaaatcctgtttcccactgcatttcaaagtcagctttctccttataaaaatggaaacattcatagcacaggaaaatatttattaaaaaattacactgggcacacaacaagcacccatcaacaaaacccagttcagaggtgtctttgggtatttaaagcaccttgataaatgcaggggttgatttttttttcctttccttttggctttttaggatgtagctttatttgtgactccaaaatcttagctagaaaggactctcattgtttgatattctttggttttactaactaaaaaatgttgatttgacattaaagaagatagaaaaatagaatttctgtttcaaaaattgtggaatttctcttcatgctagtcatccccaaagcattagtgtattaaactctagtagaaggaatgtttactgttcagtacagaaaattaggccagcaaaataattttttatttcacattaaatgtgaataagcatattcataaaggtaatttgtatatgggtgttatcgtgatgactgtgtgaagtaagggaggagacaaggcttacaaggctttctgtttaggtctccctcaatatatttttcttttcattcctcttatttaacaagaaagtcaaggaatagaagacaggctaaattgtcattagactgtgtctgtgttctttgtcacgcctgcctttcctctggactgcctgggaggatgtgtgtgctcctttcttgcttcttgagtagcagggaggaaggaatggatgcaaggatgtgaagattgatcagaaaggcacattattgcacgtgaaaatgagatggatacatttgacacctggctaaatttcagccaggtggttgtcttgcgagaggggcttgtgtgtggaagctagcaggccgactgaaaaaagtggggggagacaagaggcttccttcatctggaaatccgcaggatcttactgacatttggcttcagggagtagagctccaaggacacctgtgtgcatctgcctggagataggtgtgtgtgtgttgtgtgtgtgtgtgtgtgtgtgtgtgtagggagaagtaggcatttcatcaaaaatacatttgaaaaatgttggttctaaaattcagtcgttatcaattcgggccaggtaccaaagtcactaacgtgtccaggttaactcctggaaggcagcaacattcttgcttttgatggtacgaatatggcttctttcatttctttggctctttatggtacttcttttgagtggggcgaggctctagctttcccctcctcctttcttgatctcggcaaacaaaaccattctaccacttgagccatctgccgcaggtgtaatggatggcagggggccgacctaaccacactccagtctcttctaggtcgtcaccgctctgcaccaaacaaatgagtcctgtttcaccactagggtgccgaggtggatggtggatgctggcccccgcccctggcagcgctcagcccttagaaaccagagccagctgacaacacgcgaaacacacaggcacagcgaaaacgccgagccgacgctcattccctctgccccctccctctgctctctgtaacaaggaggacacgtacacagcctttacacacttaaaagcccttgcgactccctctgaattcttagttacttatgacggccttcctcactgcacatagcccctggggtgtgtgtgtgtgtgtgtgtgtgtgtgtgtgtgtatgcgcgcgtgtgtgtgtgtacgcgcgcgcgcgcacgcgtgaatgtgcatgtgtgtttaaaacgcttattggtaggtcatcagcagctgatcagacatggtaatccaataatttttttgaatacacacaatttttcgttgaagttaatttttttaaagaaaaatggaaaactattaattttctgcgcaagtctagggttcccagtttaggttccagagaacagcagatctgcgcagcccccgccttaccaaactttccttttctagggtttgaaagaggctcacattctcacttcatgacagagcagcggctcatttgcacgcgggtgtgtaaaggagggagctgtcgaacgcgcgacttaggaagggaaatcggatagctggagccccacgcagtcgctcggaaccttggctggaggcacaaggtgcccaggggcaagagcccggggtccaagcttccaggcgcacatcatcctctgggccccgggccctccggctggagcactccctcacccgcatcccatccccgttccattttgatcattatttgaatagcccaggtaagggtgcccatctctcggctatgggcgggggctggaccctgacaggtacggactccgcgggaccccagtgtgcttacctcgagcgaggccctggcaaatggtggcccagaagcatcaagtttcctctcccagccgttgtgccagatttcccctcctgccttctgctcctctccgccagctcgtttctctctctctctctctctctctctctctctctctctctgtcacacacgaggattacttgtgacttttagaggcaaaagcttgcttattcagaggagagagggagggggagagggagaaaggaggcgggagggaggagagacgggggagagagaagtaaaagggggatggaggatgaagaggaggtggagaatcagaaggtagtgcgggcgttgttagagaaggaggaggaagaggaggaggaggaggagggatgggaggggtagggtggagtaaccaaagatgggctgggatgggacggcgaggaataaattgctccccacccagctgcggtgcgacgcccccagcgtcccaggggagccggtgcgtcagctcacggctggccaaggcggggccgtacaaaagctagcgccgcgggacccccttcatgggcttctaccctagcagaccgagcgctggaggccgctccacgcgcgagctcgaaccacggagggctctcagctcggacaagcgtcgctgtctaagagctccaagctccacggaactttgattttatgcccgggagcccggtcatccacttctgcatctcagacaagcgccggaggctcgtgcagcttcctcgcgtcctcttcctggacgcggggcgcccaccttagtcatagcccctggtcccggcactgctcacgccgtcggtttccccactgcccaggctccctcagcccgaaccctgcgtctctgttcacattggaacaccccctcacctcatctcagcttgcttttaccgaggtgtgtgtgtgtgtgtgtgtgtgtgtgtgtgtgtgtgtgtgtgtgtacatagcgcgcgcgctctaggctagaaagaaggtaacgaaaaagtagcttcggtctcctgcagcttggatcccactaccaagtccgaccatattcagtatttgagattacagtttgcagcaaggaccaaggcaggggttcaccggatcatttcaactgagtttcaatgcagcaaggattgtttatcattattgctaagactgacaaaaataggccaaaaataaagaacagttgcatagaaagaagggacagcattttagcagtgatcaggaactaaaagtgtttggaatggatttctcgaacaagagcatccacgatggataaaggtgaaagccgcagactctcacaaaaccgtttcagtacgtgatgggattaaaaaataggaccatgcttttcaacatagactacccattagttctccgttaaatgcactaaaccagccccatggaatgattacatggcagccttttaatgtacaaacacgaggattctaaaacggatgcacacaacccgtttatagaactccctctgtacacacacacacacacacacacacattcataaagagacaaagttttaataccgataccccacacttgtaaatacatattttctcaaacaactacccctaaatacagtaattttcttctccatttccttgctgacctgtgcgacattatatttagagagtaggctcccaggatcgaca

SEQ ID NO: 324 - DNA, 305730 bp, Homo sapiens
  source 1..305730: mol_type = genomic DNA
gctaatttttttttgctagtaccacactgttttaattattgcagatttagaatgcattttaaaatttgcagaacaaatatccctttagtgatgttcttttttcagaaatttattagtgagcagtagaagtttatttttctagaggatcttttgaattattattgtaatttttattcttctttttttttttttttttttttttttaccttcccagggggaaagggcctgagcttgtacattcttcagccaagtagcaaacctctctttcacagatggtcagaatacataaaatcatatgatataaagacacagatggtgtgttcccactcactatgctgcccgccttttaattttactctcactgctgtcctgtgactttaggaaagggcggttattgtgtacagcacaagtacaaggcttagaaaatattttttttcccccaaaggcacacaaataaatattagacatagaactgaaatgcctttttgtgttcataagacttcttagaaagaatgacagtctaggaattaaagtctgtgcttctaatgggaaatccttggtcctgatgtgtttacattgaagcaactattttaactgagtcttatgaaagaccttcttaggagtgacaggtatgagctattgcaacaaaacatagtgtacaatcttatgtgagggtctttaaatagagagccggttataaagactgtgtccctgatgtgtggggctggtcctcctccccagcagacctcacctccctgccctttcagcatcccctccttggccccagctgatggctgatgctcccattggtctctgtggtgctacctgccactggcctgccaagacctcagaccctcgctgtctccttgtcccatttcccctgaggcttgtggctggttctgtggttatgactgagttggcccttctgacatcctgatccagacacttcccaacctaggctgtctcagctctccaaaagcaccctgaaaataaaaatggaaaggagtttggctccttgggtgaggttgttcctgctctccctaagacactgttcttttctgtaaatttcacctatctgaaagaaacagaatgcttcttgtttcttggtggggaaaagtaaccataatggaatgccgccttcatgctaggcattttacaggtcaccccatttaatcttcacaattctataggaagggatgcttgtctctgctttagagaggaggaaactgaggccagagggtttatggaacatgtgcaatgtcatgtggaatgttaatagtgaagccagggccaaaaccgaggtctgcctgagtccaagtccaattccacaaacatgatgttaacatactcctcggtgccaggcactgtgttttaggggcatagctgcctccctattgtcaaggattttgagcagatcagatttgaggaccttttttcgataggtctatatttttcttacagccactccccattttaagcgcatcgtgagtaggcttttggagtctgatctatcgagctgggtatgtttggaaagctacagagcagtagccatagaaagactgcgtgagacagagtcctagcctatctgtccggccagtcgaacctcatgtgttcgctgctttcattttcccttggctgaggaaacgatggtttggttttgcaaaggaatgctggggacttctgccagcttgctaacggccttgccccattcagatgcatcgaactcacagaacatcgctccccagctgctggctcgcggttctgagagtgcctgaatagaaaaccactcatttcccttcgcaaaagaggcgcccaaagcagatatttcaatatattccaatttagccgagggaagccagaacatggatgttgttgccaaggaaaccacctccttcctcctgtgtgctgtgcatacgtgtatcacttcatctctctgctctccaaggtaatatcatagctccgtgcttggggaagggtttttaaaaaggcatataaaacctcttagcatcaagaagattcattaaatgatctcattccagagaagcttaaattattctttttagatccttttatgctgaggatggggaaatggctgagtcagtgctatctctcgcagcccagcttggtgtcttcgtggagacagtttttcagaaataaacaaatcagagttcgcaagcttagacagggcgagtgtgtgtgtaataagaacgaggccgtcatgtagctgtaatgtcacggtctaatccctcctagaggatctgccaagaccaccttgatctgagggcctcctgggtgtgaggccacattgcacagggcaggcttcaaagtggagacaagagagggtcggtgttgcaaggccacctgtcaaaagattccttgttcgggaactgcgtggggatttctgctgcccaatctgttctcagacccactcctgggctgtttttgtcctgccttggtgtctggtcttgggtccacctctctctcctggacgctgccatcacccccttcattcccacctaccctattctgtatgttaaagtcagcacaatcgccctcatgccttacaacccaagagacaaactggagggtgcacttggtagtcatctgagagctcagtgggtggccccgactttcacaccttcttcctctcagcccctcctggtttttagggctcagattcccccttgcccactgcatatgcagattaaatttggcttctctctttcaattagtggcactagccaagaatattggtttatattagtcattcccagctggggggcaattttgccccccaggggacatttttggttcttatttcgaggagggagtcctgctggcatctaacgtgcagaggccaaggactctgctgaaacaacttacagtgcacagtccaggcctctaaaaacagaattatccagccccaggtgccaatagtgctgtggttgagaaaccctggcttatacttattctctttgctcgttgatgtaataaatatttattgagtacctactatacaccaggctctaagccagcagctggggatgtgaactgaacaagacagacatagcttcactcactttctcacatagagccaattgggagacgttaaacaaataattacaatgatacaaataaattattattacagcttgaatctagatctgacgtggatatcctgccacagttccgaagtctacctagtgccccagccgaacctgccctggctcctaggtggggtatggacatctgtgacatccctccccaacaccccaccaagctgggctgcaagacgggttatggtggccccatgacttccttccttggtaagccacaggacttccttgttaactgctttgctgttggtcattgcagagaaatagggaacaataaaaacaacctgaggtgtggcaaaggctctaggactgcatcatctgctgaagctccagtccctgcgctgcatctcctgagtggcatctgtgatggcaaacaaaggctccttgggcttcacgctctgctttctttctaagtggtacttaccacccgctgcatcccagccttcttctgaccagcttcctcttctgataggcttatttccatgaagtttttcagagttagaagcatgaactttagaaccagatgatcccggttggaatccatctctggcacttgctatatgaccttggataagttacttaacctttctgtgtctcagtttctttttctataaaatgggcataataaaatctatctagcatagttattgtaaggattaagtaagttattatatgcagagctcttggttcacagttagtgccatttaagcctttctgtcattcttactgttaccattttcctggcatgtcagtctgatgatgcagacgaggcaggaactttcgtctctgcctctcgtggactgcccaatcagctccacggaactcagccatgcctgcagtgctgcaggcctcgctttggactgctggaggctgagaagtcaatggatgttgcttgggcattttggggggtttccttatgcaggaggaagatgacaatcattgtggaagcagaaggttgtcatggaaatgcacctgttccaagtcattgcaccctgggctctgggctggctctgcacgggcctgccatgcactgacttcagcttcatctgagtcagtggaaggctggacaaaggtagacatctttcctcactgccagcctgccattgcggctttctgtctctggtgtgaacaggcaatcgagctttcctggtctcctgagctactgtgaacgtggcagaagatagtggactctgaataacattggaaacaactacttcctggacggccactgtgtgcatggcctgcgggagggtgagggcaagaggactgatggttactgggaatcttcttcatggccaggcttctgtgtgtcctctcacttaatcctccaacagcactgtgaggaaaatacagcatcccacctcacaggcgaggaagcttaagttgaaggaatgttaaattgcctgctctgagcctcacagccgggaggtgacagccccaggattggcggccagggtttgtctgcctttaaaacttatgtcatgtccttctgtgttatctcggtctgtacaggctgctacagcaaaataccatagcctgggtagtttatgaacaacagaaatttatttctcatagttctggagcctggaagtccaagatcaaggctctcgcaggttcagtgttcggtgaggacccacttccttattcatagacgtccccttctcactgtggcctcacagcaaggggtcagggttctctctggggcctctttaaatagggtcaccaatcccattcatgagggctgtacccccatgacctaatcccctcccaaaggccccacttccccataccatcaccttgggggttaggattctaacatgaattttggggggacacaggcattctgatcatagcatatgtgtagttgctcctggcccgctggggaaatcaccgtctccaagcatggctcccatctggttaccctgggtggccaaggtcagcagaggtgctttgccaactgattggcacccacactacttctgtccaggtgggctggggcgagggttgggtcacagtgggactctgtggggctccggggactgtcagctgccccggggctggaggtcctgctgctctgtgcccataggcacctcctgggaatctggcgacttgcatcagggcccggaactcaccctgacagttctttcagctcttgtcttttcctcccctacctacctgctcatctcgctttcacacacaaagcctcccctgcactccccgctcccctcctcaatccctttcccggcttttgtactttatgatgccgtgacttgggtgaggaaactcattaaagtcattattccgtgcacagaaatgtgtctttcatcccattcatatttaatgttcctcccacttgatcttttgatgctttttaattcttgatattacatgacatacacacacagctctcgttgggaatcgttctttctatagagttgtcatgactgctctctgtgtgaggagggctcctccttacgtatttattaatttctaaaatgatgcctgtattttgggattgatgctgtctgatgctattgactttgaatgatcaagggtgacattgggataagaggaattgtgggaacaggacagaggtctggattcttctcatgactgttgcttttcctgcctggaggccaggtgtccatctgtgaaatgggcagatgcatgcctcatggcctaatccaatccctgcatttggcatccgttgggattttctggggtgtaaacacctggtttaaattctgtctaatttgctataaaaaggaatattttaggaggagatggggctacccatagaatcacagaaaaggctgagaaattggctgtctgagggacagataaccagggcagctgcagggacctgggagcgggctcccttccggctccgtggtgaaaggaaggagacctaatggctgtcaatggctcttttctcagctcaagatttaaattccagtaagtgaacatagaattggctcagcttgggtcccatgcccaaggagagggcggggtgttttgattgacagttatattgagatcttatccaatgagggccaggagttcccccaaggttaagaggctgttttcagaagaacgatggattctgagtagaagaaacaacaaatgccctgaacacatcccaaaccatggggaggcagtgagaccatggacaaaaagaggaaaaagcaggttcttcgggttccaaatctctgacagagagagatacatttctgggcctcagagattaccttctaattcaggaggaggcaaactttctctggaaagtgtcagagagtaaatatttttgtctttctggcccacatgacttctgccatgataccgtggaagtagtggtagaagacatgtaaatgaatgggtgtggctgtgttccaataaagctttattgataaaaaacaagtagcagggtgggttgggcctgcaggacacagtgtgctggcccaggttctagttgacagctttcacttcttagagaagttcctttccagctttagcaatccgggtaagacagtggttctccgatgtggctctacttcagcagaccccaaggagcctgttgagaatacagatgcctggggcccaccccagccttgtcaaattggaatttccaaggatgggcccaaggatctgtatttttaacagttactcctagttagttctgaactacacagtgttgtgaactggtcttctaagacccagtggagcaggtaagaccatcttccgtgaaatgtggatgtagtagagaaactggggagggcttaggaactgagaggagaggaaggctctccagggttggggaacagtgtgtgtgtagggcaggcttcctggaggggcccatgctggccctagatgggaaatggagctgtcccagcactaacctagattttcctagctctcatctcattctctatcctgtggtatgctattcacaagccagaggggaattgatggaaagtccgggtatgaaatctgagccatgcagttccctgctgtgaggcagtaaggtctcagaaagttttctgttttcattatttcgaaaaggctgcacccataacccagccctatttcatggctttcctccatggcacccctttccccttgtcatcgttcttcttcctcccctacagacctgctttatcagaaacttcctttctcctttgccctgaatgacccccacctgtgcctctttctgatactgaccttattctggcaaacccagctccttcttgctgtaatttttaatgggaataagactgctgggagaagccctctcccatctctttcagttttccatgttttcttccttaacaaacaccccactcataaaacctttggggtcttttctactgagggttgaagcctgtagatgctagcagagcagctgcactgtaaagagggaggtgggttcctagggggtggtcctgggcccagaaggtttctgaccatcatcgctctccccttggacctaaacagggctctttgcttgttacaatagtaggcatccattgcctgcccaacattcacctcccttttctggcagcagaacaccttttttctcaggaatttactccatccccactttgagtccaggtggattgggtggattaactccaggatggacatggacccaggcctggcaaatcagtgcatcggattccccttggccacagtaattggttcagggttgggtctatgggcaaagtccatgctgggtcttatatggggttgtacagaggaaagaactctctttctggacttgctgtcaaactggagtttttggagtccaagtggggagagtgtgctgagagtgagtgtagtacaggggaaaaacaaagccaagatgtgcaccagagagaggatcaaagagtgagagagagaaaacaggtccagaggatggggtttgagcctctggatccagccggacctgaagccagaagacctacatgcagacttgtctactatatgaaatcttacattctctttctggattaagccagcttaagctgcaactcagagtcttgactgatagttgacttggtgctgggaagatgagtctctccacagggatgcctgagccacagggagactgccgtagtcagctgtgagctctttcttgtcctatcagcacagcccagatgagttctcaccaggaacaggtacacaacagtcataaactgacagggttagtcataggcccgttgtgctctgaaagctttgtcagaacagacacacatcatttgtccccttccacaccccgctagcagctctcagcatggtcctcagtgaatgtgctgtttgtccagctgattgaggggcagcacagccttcctcaccactcaacaactgcctgcacactctcctgccatcctggtcttgtcagtatcaccccaccgacccagtttccaagttagaagccgtcgtcctctgcctctttgatgtaatccagcctcttactgcttttccatctccaccaccacctgcttagctcagacctcagcctttcttaggaggaagccatttggctctggaactgacacctacccaggttggcctctgttccttacctgtgaaacggggatggagcactacacttgaaatgtgaaatgtctccaaggatttggatgtcaggggaatgtaatggccctttgagccattatattcaaaaggagcagaagaaagacacaaagtcacctgcaagaggcagtggcccagaaagcttagacatcacctcctgaatgtacatgaaggccatgtccatcagaagggagccttggcagccaataggagcacagaaaatgaggcagcccagaggcacgctttcctgtggaatatctggactgcattatgggcttctgtcagttgtgaacaagaacacactagagcctgatgccactggctcctccagcaatgtccgaaagcgttgacttcctgtgtttgctagccaacagggaaagaatgtgctggtcaggcagtgcaaccgtttgcaatgagtaagctggcatttgggctttgttcatcgtccttgtgagctatgagtcagcatcttggagactgtgaagtctggccatcaatgacactgcatttctggtttgcagggcttggtcaggccctgaccccaggttctcaaggtcaggagtgtatcagtgtgatctaagggctctacgccctgagattctgattgatgaggtcaagtgggaccaggcccttctactgaacagctcctcaaggaggcctggtgcacagccagactgagactcagggcctgtgcatggttaccgcacctcccctggctgcctgtggacccccttttctgcctcctttgagccttttcgcttggtgttgctgattgactttcatgttcacttgagtaatttacatggagcctgctttaattctcctgagaccccctgtaggctttcatgaaattaaaccctcaacaacgacattagagaaggaaaaagggcctctttatttggaagttgtgaacaaaaagagaacagaactgctggcagttgttcttcatctgaatcttctgcttctggctctgtagttggatcttgtaccaccggggctttgcttccaggatggggtgacttagggtggatgtaattgtcatgaccttctgggggccaggatttggccggaatgaccaccattccaattacttggctttttgctactggaaaggctgtgagttggctctctaaggatttctaaatgactaaggctgagcacagaagcagcaccccaaaatcctgtgcaccaaggttggggatgaatcctcctctgatccttctcccaagacttctggatcaagagtgggtttcattcatttggcccctctgaggagacaagtggagaaaggaagttctatttactacagggtctgtgactttatgcgacttagaagggtacaagtatgataattgtagaaagcagaacatcactctggctaggctctgttgacttggacaaaatcatctctaatctatgatacatcctgagccaaactatactcactgttggaattggggacatcattcgcatggcctcacttctgttgcttgttttgccctctaaatctctgctatcaccttcacctcgttgactttgcagttaacttctcttgctgctttgcagagaaaatagaagatgttagatggggacaccaaccttttgctacaaaagtctgaatgtaaaaacattgtctgcctccttgtcctggtttcactggcttctgactgaccaaggctaatggaatcacatgctccttaagggtctaaagggtcccactcattgctctatcttcaaagccattcccatcaggatttaggtatgtctgcatcttgtccacatttacaatggagttctttcttcccttccctttgcagcttacccactagcttctgccttatcactgtcttcccaactcacagtcaaacttattgagagaatgagctatactcctcccacacagtcctgcatctatttcaacagggtttctgcctatactcctcccaaatggatctgaccatgttaccattgccctccacgttcccacacccagggatacttcagtccttactttacttaaacctgcagaaacgtttgacaccctcaacagttccttcctgcaaacatctttccttggttttcatgacactgaattattctgattttattatccctcctcttccctttcagtcagggaatattctccctctgcctgttccttacctcagtgatttctgaggtgtctaaaaatcatccagggtggttgctagaatgcaggtcagatctcagccccaacacctcatacaggtgcatcatgacttctcttgactgcttagagtaaaatgtgggaagagagaagcaaattaaatatagaatttatactcaaaagggaagcagaactcaaagagttggagaattctcagcctgtaacacctgaaaaaatgtgttcaggagacagcatctacaatgtggctaagcgactgtttgatcagattagtagggacagaaagaagccagatgctttccatcaggacactggaagaacggccctaaaggtattttggagatcttcagggctgccacatccatcacaggcccagagtgccagggccttgagggtggtagaactgtttcaagggaggggctcagtgtgcctgtgggaccttgggcttgctgcccagagccacctccaatttttgcttcatacttctggtgcagtgctctttagccaccccagctgaggctcaagtgtggctcaagagggccctggtacagcttgggctgccacttcagagggcacaggctgtcaaccttggtagcgaacctcagaggcccaacccctgactcgttgtgtccagaaggcaggacatggagtcaaaaaatattcttctcaagcttcaagatgtaacactgtttgccttgctgggttttggacttacttgggatctgttactcctttcttttttccagttgctcccttttggaatgggaacatctatcctatgcctgtcccaccattgtattttggaagcacgtaacttgttcagtttcacaggctcacaggtagagggcagtttgcctcaggatgaatcacacctttgagtctcacccatatctgatttagatgatatttagatgagacttaggactttagacttttgagttgatgctggaacgagttaagaattttggggctattgggatggaatggatgtattttgcatgtgagaagaacatgaattttgaggggtcaggggtagaatgttaaggtttgaatgtctgtgttcccctaaaatttgtgtgttgaaacttaagacccaatgtgatagggttaagaggtggggcctttagaaggtggtaagtcatgagagctccaccctcatgaatgggattagtgtccttttaaaaggacttgagggaagcatctgggccccttttgccttttgtccttctgctatgtgaggatgaagcagcaagccaccctcttgcaagcagagttgatcagctcttaccagacaccagatctgacgctatgatattggacttcccagcctccagagatgtgaggaatacatctctgtccttataaattacccagtcccaagtactttattgttgcagcatgaatgaaccaagacaagtccactttctatctccagcccagtcattgctcctgagcttcagaaccacatatccaactacctacaagataccttcttgaggatgtgccagacagtggaaacattcaaagcagaacttctcatcatctccatgcttgctgtcccatgttcctcttccctgtgactggcaccattgcccaaccagttatgcaagggagaaacgtcgactcctccttttccactgcccccgccaaagacccaaccaatcttcaagtcctgtacattctaacccctatgtaggtcttaagttcccagttgcttttcacttccactgttcctgccctgtccagggccccccagattttctactggatgggcctctccctgggttatctgcctctaagtgtgccttctcccactatttttcacatggtgacttaggaacagtttcagtctgaccttgtcactcttctccattcaggccttgagtggtgtcctattgcttctgtttggacaaaatccacatcttagcctggctcctcttctgtctctaggtatttatcctccaggataatcaaatagctactccactagcctggctcagcaccagagctaggcagaaaattcaaatgattgtagcacagtttaccaagtttctgttattgagctaaaataaaaagggtcagcttgtccagttggattcataagaatcagagatctcaaccagtactaagccttactaataactgcaaggatacaaataattgtgaggcccgggtaaagtgtgaagtctgaaccacaatacagctcccaggacttttttgccacattaggctgtgccctggcccagacttatcactaggggtctctacgtgctacacgcgagccatccttcttgaaagcgtagctatttgggtcctgaaacatcttcacttttttctctgctagtttcatagcttgcacaacattttccagggagccatctgacataaatccataggttccaggtttgtttaccgcgagcggttttaggcagatagggcacgtctcgctaaaagcattccatagataagagagcttctgctggccaacatcattagagtgtttgccagaggctctgtccctggaaggattatgaggggatttgatggggtcatctttctgtcttgcctggggtgtctctcctacaggtagagaatgaactgcaggcatacagctgaccctctctttccccgtcctgctctgcccacctccaacatgctggtgcttcccagagctctgaccttggtctcttctcttcttactctacatgtgtaatatggagcacctcctcctcctcctcagcagcttcctttctctagacacagagtctcccaaagctacctcttttacctttcagcttcagactcacatattcccctgttcattgctgccttaatgtcctccagtcctcagacaagcccattgggtcctttcttcctttcagggcaatgacatgcacgcccacctggttctcatgaaaccttgaatcatcttggtcctgccagttgctagctctttgtcctaaagtaagtcagagaggaaaacctctatgaacctaagtttccacatatgtaaggtgggcataatagccatatctgcttcacaaagctgttgtaggattaaacgagatgatgccactaagagcttatggcagtggctggcacaccgtaagtgctcaatagttactggaagtatctttggttccactcccattcctgtggctactcattactgcatgttacaagttctagcttcttcttaaggccgcctttccattttcaccgccctctcctcacctctgccttcacccgtgacaacagttttggaactggcctcctctatgcagctctctctgatctcccctattctctgtagccagaaaaatcctcctccattatgcacctgattatgttagtgcctttgaagactgtgttgctcttgggagaattccaaactccttaaagtggtttaggaggctggctatgatctgaccgctacctgtctccctgcaactcctcacctcaaatgctgaccactgggtgtgctgaactttcagctcttctgacccgcaggatttggcagaggcatccccaccacttggagcactctcttcctttctctccagccctccaactctctcccatgctttgcaatgctcgctctgcctttctcccatcagagcactttccagctgcgtggccatgctgggttgcatgcctggacccctcatgggaatgtaaacttcaggagggcaggggccgtggctcacagttgtatccccagcacttagaacagtgcctagcagatggtaggtccccagtagcaaataatctgagtcagtaagtgagtgggcaagatgaaagggggtggggtggggagcaagagggaaatcttgagtctggggtttctggcttgaatgaaattgagatgggcaatcttcaggcaggacttcttgttgaggggtcattgttttaatgagttctttggagtagatgggcctaggtgagcttggcagtgggcaatggagatcaggcctcttgaaacaggtttatgatttgacaattagcatgggagatggatctccttccctgccccatcctcagctgccctcacagcctagcagggttggggcagagcacgcgcccactcggggggtggccatggtgtaggtaggcttcacaaggtttctttcctctaacattatcttgggctctgcatgggacagagatttcacctaggtctgtgaatcctgcaacaaactagtgctgtaacccttgtgactggcaggtttctgtcctgtttcatgtggcctgtccctaagaaccccttgttggggattgtttgggctgtgggtgggtggggtattccttgcagccgtctgtaggaagctacttgccactactcagtagttcctaggcaggaggctgtagtgcccactagggagccatgaaggtgaaaagtccccatttctcaaagccaacttttgccttcctccccaaatcaagcacaacttgcaactgtgatgaccttttaatcgattctatattgaagggtctggaggaaggaggggaagggaaagggcagaatcgggccttgtgccttgcttgggcatcttgcccccttgacctgcagaggggtgacagggctgtgcctgggtcctgtggccgcatggaggctccctgcatctttggagggtctcctgagttactccaccctgcagagtaatgaggtttctctcctcctactcctgcatcttgcaaattctgttgtcatctgctgactgtcagtggctttcctcagcccattttctgctggctctgcagagggaggcttgattccactctgaggggtgaggctggagagtgctggggagcagggagtacagaggctcacactttaggctggggctgatttctcctgaaccatcagcaatcaaatctgcctcaccactgtgagaattaattccttctcaagctccccttcagataggtgagaaatccgtgtgcctcctattaacataattgtgaccccgtttcttgtgaaatgacagccctggtctgattatgctcagggagcatccacagtctgtgtcctgggctgcgtgacgaaagcttcctcacattaactggcaaatgaacagtcccacagtccacatggtctctggaatctgcagacaatggccacgttttatctcagccataggatggggtcaagaagaagttccagtgtagcccaccacagctagttaagtacacgcccagcagcattttaaatgagcgggggaggagctctgcaaaggcgtggctggaaggacagtaggcttggagctggggggcctaggcccagcctgccatttgctaactgtgctgttggggtcaaatcccttcctcgcaaagagagcagagggctggtccgttagacctgatacttgctgattctaggctatcactgagtacagccttagaacctgtaaactgggttcccattttctgtgttggaggaagggtctagaaaactctctagaagacagagttaagaagtcaaatcagtggttggataaaggcctttcctcaaaatacgacactgcagaaggcaccagaggagctctcctccctggaggcaaggcagtgggctgagctcaaagcctagcctggccatgtgcctagttggaggcccatggaaggcatctgggactggggatgagacagtgtgtctgtttccttgttgagtcactcttgctcatcaaatatctatcgaccacctctgatgaccaagtggcatgagagaatggaaagaagtctatagtcaggggagctccatgtgcacccagcttaatcactaactggtgtgggcctgcgcaaatggcttttcaccccagcgatgtggccatgcgccctacatgcctcatcctgtgaggatgaatgaggcagtgttcctgacacagagtgggactcccccccaatcctgcgcccttccctctctctgtgtgcacagcaacatttgagacagcacagaggacactgaggccattcagaaaatgccactgtctttcagcatgaacaggcccgtggcagggcagctagtgtgtgtccagaaatgccattgctgcagagtggaattaaccagggtcccacggcctggggactcagaggagtaagaggcctgagcagaaagagttttatggatggtgctgagttgagcctagactggcttggcacttgaaggagaaggaagaaagatcatttcagggcagagaagagtttgggtcaatgcatgggtgcacagaagctcagaaaagaaagcaaatctgtgtggtggggtgtgtgcaggtgaacactccatacaagatggtatttctgtgcaggcacatggagggaggggtgtttgggtcacaatgttttgagcactggggagcacggatggcatctgggggtgctagcctcagctctccacttatggtgcagcatgttggggtaaccttttcttccccattcttctccaggactagacaccgttattcagttctctagtattttactttttgttagctcttatgcagcaggggagctgcactgccttggtgttggaataattgtcctcttgtgacactgtaaaccacccatgcaccagccttcccacccccccggtctattgttctccatagtgcttctcttcatccctgcaccatgtgtttactactttctgttccccacattagaatctcagctctgtgaggatggggacctcaccgctgggtttgctactctacccaaagcccttagaggactgcagcaaccagtaggcttttgttgcatatctgaagaatcaatgagtgaatggcagttggatggatggctccttgatcacctgtcgtggggcagattcatgtggcaagatgtcaagtaattcatccaagcccgaattcacattcattcgagaacttacaatgcccaagagtgggtggtaaatattgtaggatgcccaaagctcccaagatgataaaaatgaccctggagttatactaagggccaccctgcaggctgccccctcctgtgcctcctgataatcatggcttgttgtggggtgttaactgtcacggtgatggcagggctgaactggagctctcacaaaaggagagtgagtttttcagagagccttggttcaaatgaagtcttttgaaataagatcaaggagtatactcttttcccatggtgttggtaggtgttaagatgtgttagactgtttgcattgctatctgaggctgggtaatttataaagaaaagagatttatttttgctcacggttcttcaatctatcagtctataccacatagcaccggcatctgctcctggtgaggccttaggaagcttccaatcatggtggaaagtggaagggacccagtgtatcacaaggcaagagggagcaagggagaggaggaggtgccaggctcctttaaacacaccatctctttcttgaactaacagattgagaacactcattacctcaagaacggcaccaaaccgttcatgagggatccaaccctatggtccaaacaattcccactaggcccatctccaacactgaggaatcacatttcaacatgggatttggaggggatgagcatccaaaccatatcatgtgtcagtaacatttcctgaacttcagtaaacaccagaactgattgctgtcctctgttactcaggtccatgtgggaccagggatattaaaaggagggaggatcctgatggaaaatgcagcagaatatcaatgcttatgaatagacatccgatttcctcccccaccaagtgtgtgggaccgctctgtagatagccttccccctcactgcctgaggctatgggattccctgcttggtatccagccccatgctatgccctgaggtggtcttggaggtctttgctgccaggagttcacagctagttagggaggtaaggcacaaaccaggtcgagacaggtagaggagcaggatggggcagcaggagggtgcagggtcagggtggggaggtcacagaggctgactcctgaatgcaattgcagagactcgagatttagagcaaatttttaaagcttcttcagactatgagcttcttcacaaggtgagggaagaagagaattccaggcagagaaaacagcaagtggaaaggtgaaaaggcagtgtgtgtgtgcatgtgtgcctgtgcattgtgtgtgtgagagcatgtgtgcatgtgggcctgtgtgcacatgagcatgtgtgtgtgtgcgtgtccatgagtgaactgatgaagtttctggacagtgatgtgagggaggtgggaaggaggagggaggaggtgagaggagaaggagctggtgagggaggtgaggtccaggctgtgaaggccttgaatttccctggacatggcagcaggcccctgaagggtttaggtaagtgctagtgtgatcatttctattttagaaaaacaatactagcagctgaaggccgggcgcggtggttcacgcctgtaatcccagcactttgggaggccgaggctggcgggtcacctgaggtcaggagttcaagaccagcctggccaacatggtgaaaccccgtctctactaaaaatacaaaaattagccgggcatggtggtgggcacctgtaatcccagctacttgggaagctgaggcaggataattgcttgaacctaggaggtggaggttgcagtgagctgagatcatgccattgcactctagcctgggcaacaggagcaacaatagtctcaaaaaaaaaaaaaaaaaaaaaaagaatagattaggaggtgaggccagaggcagggccactcactagcaggctgttggaagaagccagaagagggggtagcaggagccccatcaaggctgcggcactaaggatatggacaggggatggctggaatggccatggcctggtgactgatcgactggtgtgtgaggagagggcctctcaggagataagagtccagggtcactccagggtatctagtctgctggcagggaggggacgagtggggacattaaccaggatggggcccctggaggagacctagtcccagggcggggtggggacgatttgcagccctgggtgggtgggaggtgagatcaccgtatggtattaggtgtcctgttctgggcctgacccaggtttgcttggtaaagcctacttctgggctctttcctcttccccttttcctttctgcttccattcccttcctccctggtacagtttcccagtctcctcccttccccttcagcagcgatctcaagataaacagctggggaagaggagctgtggaaacgtccaatcagggaaggttattaacccaggattctaattatggtgttgccctgtgtctcttgcatggtaacaagccagcctcaactgcttgagctaagagcaagctcagtgtttccttcaagcagcatcgtggacagattcctgccagacccttcagagcaagcaccccacacccctagcccagggtctcttcatcgatagggggtgatctgtctgcccctcactgttttctccaaataggtaagaccgggtggccaagcatgtgattggcagcaaagtgcacatcagcacagcagccctggctttcagcagctgaggtcagctgttgagccaatgcattttatttatctgcctaactgccaccatgacctcttctgggagccctgggctggggtggtgccctcacctctggtatggaggagggagccctggcccaggggacctttctttgagtaactgttctgtgcagggctctgggctcagtgctgagatgcaccatggatcagacagaggctcacggacctcagccatttctttggcatgaggtcattgcagctcagaggaggggctgttgcccttaactgcatgtgtctgtgtgagtggagtggggaaggttcagaaaggttgcttcttcttattgctcgtttctaagttgcttccaaagcccccgatgggcttctcagctctctcaagaggaaggcagaagagagtcagagagagatgggacaatggaagcacaggttggagggatgtgattgctggcttgaagatggaggaagggccatgagccaaggaatgcaggcggcctcaagatgctgaaaaaggcaacagaacagattctcccctagagcctccagaaggagcgcagccccgccaatacctcgtttttagttcaatgaaactcattcagacttccgatctccagaactgtaagataataggtttgtgtgtgttcagccactaagtttgtggtactttgttatagcagcaactggaatctaatgtcaggggccagatttcaagatgccgtaagccatgtcaaggggtttggattttgttctgtagggctcaaggcttatcactacttaggagtctgtgtatgttaagcacataagcttagattatgagggtttgaataccacccttgccaataaccagctttctcaaagctgcagcattttcagctccaaaagtggggaatcatagttctcatctcattgggctagtgtaaagattaaatgagatgatacctgtaaggtgtttagcccagtgtaggccaggaaagtgattgttacttttacttgcttggcaaccttaggtagcataatgcctcatctggcggctttgatcatggcgtctgcccagggaaggtatagcaacccccctccaacccccttaccccccaggaataagtgaatttgtgatatgattgtattagtccatttttatgctgctgataaagacatacccaagactgggtaacttataaagaaaaagaggtttaatgaactcgcagatccacgtggctggggaggcttcataatcatggtggaaggcaaaagtcatgtcttacatggtggcagacaagagagaaaagagagccaagtgaaagaggtttccccttataaaaccctcagatctcataagacttattcactatcaccactaccacgagaacagtatgggggaaccgccctcatgattcaattatctcccaccaggtcccacctacaacatgtgggaattatgggagctacaattcaagatgagatttgggtgtggacacagccaaaccatatcaatgatgaactggaaaagaattgaagggtgtgcccctattggcctggcatgtggctgtctgcccacccatggtgggagcaggtgcctattcaccctgctcacctagcccctgcttccctcagctccccataggcatgtctgcattcctgtgccccttatgggctgtattcatttctggcccctgcactgtgctccaggcataagctattttagtgacaagttccttgaaatgctacaccttccctgcccacccagacagagacctctccaggcccagctgtcaagtatcgatttcccctttaaatattactgcagcccaggagcatgtatggattaattgacgaggctaggcttgtacctgcacacttcattaacagctgctactaattagtggagtagtcatttagagacctactggggttttgaggataatagttttatttatttttttccatgactcttaagcatacaataaattggggagtgaaatgccatgggcccaagtttggatgggagtcatggggcagcctgtgctctggatctgccctaagaacacaacagaaactaggacatcaccacagtgggacccagagttaagcggcccttcaggtcatctggtctactatatgtggctactgtggctgggactgggataggggcagggcctcattctcaaggtcacacagggacagggaggcagacctgggatgagcacccagggctgctggccttgttgctggccagggctctgtttgctaaatggggactctgccgcatacatttggagaacccaaatgtgggaggatagaccaagctcatggccacgtcctccgcctgccccaatcttaccctcttttcccaagagggtgttgcccttcctttcccatttctgggcctcctcccatcccatccacatcactccacccttcccactcccactggagtcctgctataccttgctgctggaacccctttttctgtccttagcatctccaaatggactagactcgacaagcaaacagtctgcagtggaccccttgggtcatccattctgatggaaacagtgagtcgaattaatcctaagtctttgaatttgggctactcattgactctctcagctttatcctcaccagctcatggtgaggctgaatgcacagtagtaaaggggaccaagcatggggatggcatggaaagagtggttcctcagcagatggtagtgcctgtgcccctgtgctccttagggaggtggtctgtgggcaaaccatcgtgctttcctcaggctgacctggaccattcactgagtgcacgttgagagattttacagcaaaggaatagagacttatagagacttgacttattatttccttcttgttttacagataatgacagtaattcgcatcactaaccttccctgaaagcttactacatgtcaggaagtgctattctaaaagggcttcacatgtattcattcatttcatcctcctgacaatcctgtgatacaggtgtttttgttatgagtcctatttcaacaaagcacaagtgaatacagtaagttgcccgtggctacacagcatgtcagaggtagaggtgaacccggcattccagctcacagtccaaacccttagccacggaactctctgacctcttagagaggtcgatttcctggctaagggaaacccctgttccccagtgtgtgctgtgtgggtggcagctgtgttggtgccacaggtctgtgtcccctggacatctgctgatttatccggggtggtcacttgaagcaaagactgtccacactatataatttgagtgatatggctcaaaagtgcgggctgggccaatctgagttcgatctggggaaaggtatgaaagaagctgagcctggaggtgggtagagttgatgagcttgacctagggctggagactcatcatgatcaccagctatgagtgattggaggaagccagctggctgagaaaggagacagaaaggtgaatgaatgccatgagagagacctcagtcctggaagggcagctttcccctacagtctcagggtgctggctcccatggagtcaggctgctcctggcctcctgtttaggtattctggtgaggatgtgctttatatcaaactacagatgcccattgatttacgatggggccatatactgataaacccatggtaagctgaaaatactgtcagtcaaaaatgcacttttgggctgtgcatggtagctcatgcctgtaatcccagcacgttgggaggccgagtcgggcagatcacttgagcccaggagtttaacgtggcgaagccctgtctctacaaatatacaaaaattagctgggtgtgatggtgtatgcctatagtcccacctactcaagaggctgaggtgggaggattgcttgaacccaggaggtggaagttgcagtgagctgagaaatgcctctgtactccagcctgggtgacaaagtgagactccatctcaaaaaaaaaatgcactttttatttaagatattttcaacttttgatgggtttattgagatgtagccccattgaaagttcaggagaggactgaatgtgtattgcttttgcaccattgtaaagtcaaaaaatcccaggtggaaccctcataagttggggactgtcggtaatttctctctttgagtctctctggttgaactcgcagcctctctcttccttggaaacagaataactctaatatgaacagttatcttatcagctctatagagtagcaccaatgtgaggtggggctcaactccatctatcaagcaaggcttctgcacaagaacaatatcctttttaaaaatttgttttaattttttttttttgagacatagtctcgctatgtcacccaggctggagtgcagtggcatgatctcagctcactgcaacctctgcctcccgggttcaagcgattcttgtgcctcagccttctgagtagcttggactatgggcgcgtgccaccatgcctggctgaattttgtatttttagtagagatggggttttgccatgttggccaggctggtctctaactcctgacctcaagcaatctgtctgcctcagcttcccaaagtgctgggattacggacgtgagccactgcacccggcccacaatattcttaaatataactggcatagatgggtaaagtactctggacacagtgcccagctgaacataaacatctgtactagtcagggtaaggatgaggtaagtggcttatggaggactgaagtttctttctttttcactgcacagttctaaagtgaatggccagggttggcagggcagtgctgagcctcacagccatccagggattggggtcctccaaaccactgccccaccatccttgagacccttggtgtaatctcagtgttggagcagggaggtgccatgcctggtcctgccacagctggaagagagcatggaggggcacctgatgtcccaagtcatctccactccccttccactagtgagaacttagcacatggtctcacctagctgcaagggagcctgggaagtgtagtctttttcagagttggcaactgctgtctgtaaagggctggataggaaatagtttcagctttgtggggccatatactctccattgcaagtactcaactctgcccttgtagcttgacaaagaccatagaaaatatgcaaatgaatgggcatggctgtgttccaataagactttattcatggactcctaaatttgaatttaatatcactttcatgtgtcatcaatattattctttttttccaaccattaaaaagtgtaaaagcctttcctagctcatggccgttcaaaactaactagtggtttggaactggctggtgggtcatagtttgtggacttctgactcctggtctggacagcgattttgggcttggccacactttgttaggggagattggattttggcagagagtgagcgatctctaccactacgtctactgcagggcttgcttagagagaggtgtcttagcaaaagcagggtgccccctgcccccttctctgtacaaacagaagagcagaattcacttggtgaggggggaacagcaatgcccctcttcccaaacttttcaggagcaaggggagggagaagccatggtggggggctcctgatgtcaacaggttgtagagaaagtgtcagctcagccctggaaggtcttctgcaatgccagataaggagctacaagctggcctcccagggctagaggcttgccatccagaagcaaccagcggctgggccgggagacaggtggcagcacccccatccctgctactagggctcaaggacaccatgcaggaggtggctttcaaccagacaatgacaatttttaataattagaaagtgacagctacaaatataaaatgtgaccaaaaaatctgtcagaaggaatgaagataccattatttgaagagtgttttcctccatccctccctcctcctcatcaactcccaatgtgggggtgggagcttgccaagcaaagctgatatcagttattgagaaaaatagaatcattccctgtttgtacatcactgagtttatactgtcaatcaaaacagctacacatatttttagcatcaactgccaattattctttctgtctcagaataatcagaaccaaagactgaaaaattcacttaagggtgttagacatggagtcaggccagcctgggttctgacagtcctggttctgacaggtcctgtgtgacctccacaagccctgtgacccctctgggactcagtcccctcatttgtcaaatggaggagagtaaaacctattgtgcaggttcgtggggagaagcccatttcggagcattgctcaacagcaaaggatgactttagtttgtctctgtgggtctcagtcttctcgtgtgtcaagtggatggttggactccatgatctgtttccactgtgactttcagtcgctgcaccactgatggttgagtctctgactttggaggagaatgctgcccttcacaggtgcttctttctacagggaggttttgaagaagatgaaagcagtggcttgattaggaacttcctgctcttcaaccttcccaggctttctgggcacagtgcaagctgacctcctctgggatgtcctcctagatttcttcaggcacaggccatctctcctgtttattagggacccgtgtatttaaacttgacctctaccccagcctttgttgtctactttctggtctgcctggggaatttgctagaggtaaactccctgtagccactctgataactgatcctaaccctaaccctcaccctaagcccacctggagctctgtgaatgggtctgacatgcacacacacatcatagctctgtcggcgacactggccccacttactggctttaaccctccctgagcctcaggtcccaacatttgccttaaggcacccttgcttaaacagcccattcagacacactcacttgtttgaccttggtgttggacacaaggagccctgctgttcagttgctcctctcatcccataagtgtgggctggaggtgccctgttttggggctagcctgggagaggccaccaatctcacatgcctgtcatgcaaaggagacaaagcacccagatctcccagccaggagcccctgttgatagccatgtcctcttggaccctggggtgacgtggagagcacagcaaccagctggtccacagaccgtgcagacgttctattggcctcacattgcccactggcttcgtgcaagcaggaaatgctatctcaagtggagctctgtcccctcttcctgtcactgtacaaatgatggatcaatgaccaccctgggagagtgatgttcttagggaacatgtgagagagccagccaatgaaatgtataatgcaaaattaaggatgctggtccttgttcacctcattaaccatctaaactcttagtatgtgtgaggcatgttgtggtatgtgacagcatttaattcatccattcattaattccttttccattcagtgtttgtggtctgtccataggtgttgggaatatggggcaaataagacaaatagttccaggtctggtggcgcttacagcctgggaggagctacacaatgaaacaattacaaaagcatttgatttgacgagcctgcagcctgggctgtggagttgaaggtggccagacaatggtgagggccagggtatagggcagagcacccaaaatgttccaggcagagagaaaagaaaacaggtgggagagctgaagggagatgcttgtgtctggataccaaagcatgggggtgggcaaggtggttctccaagggggtagggaggggctagactctaggggccccaaaaagcatgacaatagtgtttgaactttagctggagagcaagggaagtccccaaagcttttctggcagttgtacagcaggacaagttttcacttagaaggactcctccagctgctgtgtccagggtacatggataggaggagagtggaaactgctgaggtcacccaggtaagacatgtggaaagctagagccattaggatggcatgcaatgggttgagatcggttcaagagctctaaggaggaagagcccacaggatttggatatagggagagggagcatcaagactgttcttaggtctcccttttgagtgtctggttggacggtggcgtctttaattaagattggaaacacagagggataaatggactttgggaggaagatgattgcctgtgagacccccaggtgggtctggagttcaggagagaggtctggggcagatagtgatcaagatgggaagtcggaggtatagaggtggagacgggctcctctggagggctcaagtcttccagagaggagtggacagggcctggcatggatcactggaaacttttctcaatgctccacagcctctatgtacagtcctcaaattatatgccaattatgcaccaattatataacccttcttggtcaaccagaggaaaagaaagataaaactaagagagtgtagtagaaatgggggaggttaagggtcatttttttgccttctcctactcatcccagccacagggcctttgcacttgttgcatgaattcctggaccaccccttccccagatgttggtctggctggctcctcagccttcaggtcaaatgtcaccttccctgatagccatctgattaccctgtcccaaactgtgctgctctcagctgtcccagccacagcaactgatttgactttcttgtcttcttgtcctaccttccttccttcctccctccctccctcacttcctcccttccttccttccttccttccttccttccttccttccttccttccctccttccttccctctttctttcctttcttcctctctctctctctctctctctcttcttattttagagacaggatcttgctgtgtcgcccaggctagagtgccatggcacaatcacagctcactggagccttgaactcctgggctcaagtgatcctctcagctcagcctcctgagtagctgggactatacgtgtgcactaccacacccagctaatttttttttttttttttgagacagggtctcactctgttgcccaggctggtcttgagctcttgggctcaaacagtcctcctgccttggcctcccaaaatgctgggattacagtcctgagctaccaagtcctttgctcattcctttgtgggtcttttttctgtttctcctgaccatgtaaaacccctgaaggcagggaccttatctgtgtattgttcacagctgcttctccagcactgtccttggcttgagttattctcaattccccttcccttctcctccaacaggcatgcagcagcaacacatgtgtgtgggctctagctcttgtgcctctcctgggtctgttcctgtccctcagccactgctgtctgaactgcatccatgagcaggtcttgcttgggtcacttgtctttcctccctctgctcttctattgtatgattcacatggcagccaggagcctctgtctaaaatggaaatcttctcatgtggttcccttacctacactctgcaaacgacatctgaaaacaactccaaatgccgtatgacccttttcagaggccatgatagtctagcccttgcctaccctgccagttttctctcctcctttgcccttcactctgcgtcagacacatggagctctcagcgtctccagtgtgctgctcctccctctcacctgggtgcctctgctctgcctgccatagcttgtaggagctctctaaatactgaatgcacacatgacaaatccaggacaacaaagggagaaaggatactcattgggacagatttgcctcctgtttctctccctttccagggaagcctagcagagcgtcttacattctcactgcaggtctctcgtaagccccaaacactttcccttgtcctagcatttgatgcctgagtccctcaacccagtaccttgaactgcctccagggccccagccatcccaggcagccttaattaattgtaaaattgattaagcagccccctttgttaggctgggctggtgtttatttgtattttcatactattatccttttatacttctctgggcgccttcagctctctactgacaccttttattggggaaatgttaatttaaaaatcatctataatgcaggtgtcacaaatcaaagctgttcggtaatgagttgctcttatgtcgtataaaaacaattaattaaaaccctttctgagagagccgtgccagcagatttatgtttcccagtgtctccccctcgaccttcctttctaaggaccctcatgcactcagctggcttctatgggggtatggtttcctcccacctctccccaggaaatagaattccagcccggtggagtggagaaggctccaggagggcgtcgggcccaaccaccttgcgttatggagcacagagagggattctgctgtggtcacatagcacctaagtggttgcagcagcctcagaacaggctgtcctgcctgagtcgttcctcgtgatcactgctggcgtttctcctgctggccttcatggcaaggctgatggccagggcacacaggagcaacggcactgctggtctagcaagtaccactctctggcctgctccacagcccggccacagcaagggaggtgagtcattctccgctgacagatgcagtcactccacagatgctttccatctttgctaattaattctgcacttaagataatccaagggctctaagttctggtcttgcctctactcctgacccatcctgtaaccttgggtaaatcacttccccttggttgggcctcagcttctctctctacaaaatgggtatattgattgaaaccaggggttgcaaattcaaatactcataggtaccatcaatgaataaggcagtcccggcgggacctgggaaaaaccatagaggagcatgccctatctgaaggagaccacctctatccctttcagatgcttgtggccataagaaaaagcaggcctggcgttgctctttgcagagaaactggaaatccagcttggggtttcaaaatgttgatgagcgggccagaccttgctcaatttgtcctcagagccccttcttccacatcccctgttctgctctcaggggctggccatgtctctctgtgacctactgaggttccagggtggctgggtcatcctggctcctgggcttcgtcaccagcacctccttcctccctccttacctccctagggtctagagctggtgctggtctctgggttgccttgctggtttctcctcacctgtgtctccagtcctcatgttaaattccctctgttttaaatacctcccatggtttatgggttcctggttggatcctgactgatacatttcataattttattaacagacattattattaatgaacacaatgaagagcaaaaatcttgtccgtgggtggctggatagggtatgaagattccaggttataatttggttcagggtagacctgggaaatcagacggtatcagtcactgtagaagcttccagtcttatatactctccagggcatctgcatctggcccttctgcctccactaaaaagtgacctctcattctccattgctgggacttcttctggccctgccctgctcaccctctccctggttggtggttctttttttgagactaggccttgctttctcaccccaggctggagtgtagtgacgtgatcacagctccttgcagcctcgacctcctgggctcaagtgatcttcccacctcagccttccaagtagctgggaccacaggcacaccacaatgcctggctaattttttttttgtatttttatagagataagatctcactatattgccctggctggtctcaaactcccgtgttcaagtcatctgcctgcctcgacctcctaaagggcaagcgggattacaggtgtgagccattgtgcctggcctggtgacttcttttatgaagggggattgggtgggctccatgcaggcaaatgactctctccctcccctgacctctccagccttctccacagcccagccacagtgagggagtcatcagcactggaacccggggtccacggccttggaggatccggaccctccgcatttgaggaacttggccttcagtcagggagccaagaagtccctgccaatcaaggagggggtgtgggctggtggggggggggcagccttggggcacgggagctgatagaccagactcaagagttctactcctgacttctagattgttccacctccatatggaatatgttccttccatctaacactgtgtgatttggggaccatccaactcaaatgaaagaagccaagccatgcagcgagccaccccctccccaatgtggggtaccccctgcccccgcccagctcccctgccctcccagctgaggggggatcgccgcctggtgatctcagcctcccctccaagtgggctgtgaagtgtctaatccaggctttcatctggcatccacaattataatgtcaagattgaataatctgcctttatctcccgggtgacagccatgtagaaacttcaaaagaaacagttttgctggcatctaacggcttttgttaattactatatcccaaagaaaatgaaataaaggagggagaaaaatgatatttctctgtgacaactttgtaaaaatatcagtgatgaagtggtgcggtttaagggctttaagtattcatgcggctgagatggggcctctaccctcccgctgggaagcttaagcgtgcccgagggtgcatgcacacacacactcacacactcacacatgcacacacgcactcggatctgctcccagaccccttcaaacaccatacatgtggttatgggcactcatcttcataaccctctcacaaagtcctgtgctacacacacgcacacacacacacactcatacgagtagagtactccttccttcattggatggttcagaacccttcctatgaccccagttgctgctagggacacaggcttgaaagagggtcctttcagggtagcgggacagcgaggaagacacacaggcagacagtagctcgttttctgttttctcttgtgtcacactgcacaggtgtcatgtgccatgtgggcacctaagaaccatgtgatggagggagcaaaagcacaggctgtgggccgggctgcctggatttgaatcctggggatatcttgctgtagctgtgtgacctcgggcaagtcattcaacttctctgtgctggaatgtcttcacctgtaaaatggggtcaataatcgggtgtcctggacaggaggaggtacaagatgaggtaaatgaagtaacacagttaaagtggtccccaaatgttagctgtcatttagaggtgtgcagagtggctgactctgcctgaggaggagtggcctggcgttaccagaaggcttcatggaagaggcgatatttgagtttgcagccttgaaggttagaggaaaaggagcacatatcccaggcagaaaaaacagctcatgcaaagacttacaggtatggtggtgcattcatgtcccatccgtggtgaacatctggtgtgactggagaacagtgtgaggtatcaggaggagaactggatgggtaaaggctctggaaaggtaggcgggatgtaccttagtggtgacagaccttgggtttcattgagagggtggagtttccctcgaggagctgggggctgctgaagggctgtggtctgttgaggacccccatcagatggggggagccatggagaatcgggggcaggtgggcatggcctggagtgggcctggaaacaggagaccaggctgttctgagaggtcatggggcacccccacactcactcgctgacacacacatacacactcacacgtgttcataaacacccacaggctcacagttccacaccggtacacacatactttcctttcctcttgtttcccaaatggcacttgtaggtggacttttaaattgaaactccatttctctgcagtggctcttgactcctcaattacctggtagtggattggcagagatgtgattaatggaggaaattgccaaaattaacccctggaggccttatgtgctcctctgtgatatgaagggagtgcctccgaggtagaggagcatgggctggcgacagctttggtcctgtggggcaggagacctggcatctggttcgggtctcagtctccctagctgtaaaatgggagaattgaactcgttctccaagagcccatctaatgacattgttctagggtcttcatgagggctaaacaatcacatcagtgtgtgctagaaatgcctcccacagagcagtgagctcatttcaaagcaaaaagcagttttgggataacagtctactgagtgccaggcacagagccaggcactgcaggggattcaaacctgagtaggagaggatatctgtgtcctacttcctcctggcctcagccctcttgttactttggaagtccctggaggacagacactgtctggaagctgatgccaaggtaccctgggcactgagtgagggagaggtggcaccccatttgattggaaggggcagcgtgtatagactgagccaggcctctgggggaaagggaaggtgaacatcccaggcatggggcatagcctgggcccaggaagaagctcaggatgtgtttgggacctgttttgactgcctggagctcagagagtgagacctggagggtcaaggccaggaaggtgtgggtatttggaggccttggtcttattttagacagtaacacaaagtggctccagcagaggcagggaggtaaaggaagcctccacaaagtatcctatgggcaccagggcgggaggagctgttggccttcaggagctgctggtcacacgattggccagcctgggggacccgtcaacctctgcttttcttatcatgccctttttactctttttttctacttgaggctggctggcttgtgaggaaaatggccaccccttctcagcttgccacaacctagactgaggaaccaggtttctctggggagaggatctgatgggttccacgtgggtctaatcggatttgacaaaagaggtggagtactactatgggcagagcatgacaaacccctttgcaggattgtgggggcttggctggctgccactctccctcccttcggctttggaagcttggcagaagattgcatggatgtttgtaggccatggggacccgtggcaggtggggtccgccacattttaaaaaggctgtctgactctagagtcataagtggacacaatacgtagggagggagccagaataaagcaagaatatcccaaccttgtgaggtcacaaacagagtctcttcccttagcgtaaagtggctttccggggagatcctgtcctcaaattctccctttcccatggcaatcagcaagggggttttcctggtatttgtggtcaggtcttgacccatggaagcaggcaggtagagaagactagtgactctctaccctggaaggcaggagactggggcaggaagtttgaggcttggactaagaggtgaccctgttggcacaagaaggacagcagggcaggcaagtggaatcccatcatctttgaccacctgcctgctccaggaagcaggcatttgccctgctgggatcttctgaaagtgtgcaaccttgaatggagccagagaggagaggagtctgtgcactgggaggagtgaatggaattccgctgttttgcaaacattccaaagcagcaggagccttcagtcaaatgagcctcctccccacataaagcagaaagacctggagctgctgcaggtgggaggcctgcaggcccactcaggacagctgcggaggccaggaggggtgccccctgcagttgtgtaaggcacaatcagcccagccacacaggctggccccagcccactccactggttgtcctgcccttgtccccaagccacatcctagaagttcactgaaaactcatcatctggatgaggccaagtgagggtcaccagcttggccaagagcacccctagatatcgatgactaaggggggattccatgcaagacagggctatattgaggtgactgcatttggaagtttggacaaagacactaggctttagcttgcattgcactgatgccctctttggccctggaagcctctgtgttaagaatcttctggggctaccttgtccctctggcccctgtgtcaaagtgtcacctgtgcacatgctggtgtgtgtgtgtgtgtgtgtgttttgagatgcagtctcgctctatcacccaggctggagtgcagtggtgcgatctcgtctcactgcagcctctgcctcccgggtttaagaaattcttctgcctcagcctcatgagtagctgggattacaggtgtgcacgaccatgcccagctaatttttgtgtttttagtagagatggggtttcgacatattggccagggtggtcttgaactcctgacctcaagtgatcctcccacctcagcctctcaaagtgctgggattacaggtgtgagccaccgtgcctggcccacatgcttttgaactgagcacaagtcattcatttggattatgtatttccctttcttcttagatctcattgaaaacccgcactggtgggatttgggttttagcatcacagtaaggggctccctctgccctctctggacccctgggcacatctagtgctgaccaccttctttccagaatgctgatcccagggtttcagggccctcaaagctctgagtgtcccctgtgatgctggcagcatcacccttctgccctagctaagcccccttgtccccagagcccctctgcatggtggtgaggagggagctggggctgttcattcccccccaattaaccctgcctgcctgaggggagcactggccccggaaccaatctcagcctcccttccactagtcattagtctcccccgctgcaggtagagtgacaggcaggctcaggagctcctgaaaaggcctttgttttatcgccttcagttcagatgcttcagagcactagcaggccatattttaatctcaggtctttgcaaacaaaatcgttaaaagcagatggctgtgaagactgccatgaatattaatagatattgaaaaaaaggccccttaatctttccataaatctttctgaggaggtgggggaagacttggagatgagggctgcagtgtagttgcaggtaccctggcccttcctatctgggcttgatcctaataactgaggaattagcacaaagataggtggttccagcccagagttgggcactgagatgggcctggagaagcagtcttgggcttgccatctcctgtcttcctttctccttcccctgcagagctgggctgggtgaggacccggatcctgctcagcaccctcattcatgctgaggccagctgtggatcggccctgttctcttggtgctctatgtaacgatgctgtttgctgtcacccattgtgtgccaatttccacacctgtcagccttgcatcaaccttttgaggtggaattatcatccccatttcacagattaggaaatagactcaggaaatagaaacagctggctccagatcactgggtcagtaagtggaatggaagcgatctggacccagatctgttggccctgaaagcctacgtgttaagagtcttctaggaccgccatgtccctctggcccttgtgcaaaagtatcacctgtgcacctgcttttgcactagacaccattcattcattcatttggattatacatttctctctctcagttgtcttttaaaatgcaaacactcctgggagaggtaacctattaagtggctgagaaatattaaaagctgttcagccgcataatccaggacctgagttgaagtcttagctcagccatttcctggctccatgaccttgaggcagcatttaattccacagagttcgtttcctctggaaaaatgtgggaataatgaaacaaccctatgaggtagacagacggggcaggaatttgaagagatcaaagataggaaagcactttgaaaaccacataccatcatacacctgcagaggaatacggtcttcatcgttgttgaaacacctgattcatttcccatcactttcatggtgatatgagggaataagaaccaggggtggggagaggtgaagcgggcagggggcacagcctggtgggagtggggtggtgggtggcaggaagggacatggctgctctatggagccaagggcattggtcctaagcttttcttttcctggccagtggctttccttgctttatgcttcaaatctaattcagtccatcttcctccttcctccctctccactcctcccttcttctcttcccattcctcccttcctcccttccctcctcattgtctgtctctctctctgacaacaaatgtttttggatcacttgctagtgttccaggggtggggaatcaatagcaaacatgagcagtgtggtccctgcactaaataagtaacaaacaaatagatccagcaggtgcatactggataaacactttgcgagaaacagacaggggacccattttacataggtggaggcctctctgttttcccaagctggttctacaaagctgacttatgttgggatggcaccccatatgaccaaggctggaaagtccttagaggacacaggtgagagccagacagtgagatgaacagaaagagtgagccaagggaagcatcttttggtgtgctgctttcaccaggcaatggcccccaggcccagcctcctggccaggccacacccctcccaaactcctcctctgtctgagtcccatccccataatggcccctcccctggcctggttctgcccacaggcactcttcttatataggataatctggctgacctgatactcctaggagtgggtttaagtgaatcccaaagactgagaagaggagagtgaggtgggggcctaggaggggctcactgcggttctctggctctaagttttcatgcacagggttcacaggaaccagttttgagagaaaactcagaaatggaaaaagtaatccatcacttgagtcccattaaactgttgctattccaaatgcaacctattcttggagcctgagtacaaagaggcagaaacttgtcacgtttcaacaaacatactttattatactgtataatttaaggtatcattttattcaagtgacattcaaacgtgtgaaaaacggttgcatatgccagagccattaatgaaatcattacgtacaaatggttacgctttaccaagtcattcattaaaagtaaattaatgagggggacagcattaagatatttcacaatcattaccaggtccagcctaacccacttttataaatattcatcaacaaaaacgtgcctcaagaactcacccagtaaattaaattctcgtcttgaagtgttttgcttctattaatggcatcaaccgtggtactttctttgatttgttttccggaactttgggatatattgtacggaaataatgacaaactctgagtaatcgctgataattaggccaaatctattattcccatggtatttacattttgattactattttccccccaaaggcaatgtcttgaatctattctaatacaaggcaaaatagtatctgagattttcagggctggaaggaaactcagaaattagctagtccagccttcacctgatgtttgagtcttctgtcaacatctctgccatgcagccctttgctttctacttaaatacctccaatgatagggaacccattatctctgtggcccattccattcttagacacctttgattatcattacctcttgttaactttcatgcacattcttagccccgtgcatctgggtggaatgaaaaattcttcacaaaaatgggaaagttgtcctgtaggtataatcacactctggtcttcccttaattctttggcctccagcctaagcatttccaggatatttgaaacttcctctaaggaactgaactccagcctcttctatttctttctcttttctgcagagtaggccttaccatgaagtccctgcaagatctggtctcgaactttatcttcccatcacccacagtttctctctgtgctttaatcaggtaatcctgaaccatggctggtgaccttacacagactgctcattaacttttagcctttacacaggctttcccctctgtctgaaatgctctttccccctttatctacctggtgaactcctattcatcctgcagaacccctgttcagtggtcaacacctctgtgacaccatccttgattgattcccaacccctccccatgacagactgatcacacctccttcctatactacttctgttctttgtaaatacttagtattttccaagggagtgggagagaagaaatgctaggttcatgaagggtctctaggttaaactttctttcttttttttttcttaaaacaacacacttattatcttacaaatctgtagaacagaagtcctttctttggctcatggccaccttccttcatcttcaaagccagcaacatcgggctgattcctcccagattggacttttgatgttattctctaaagaggagagttagacttgtagcctcagagcaacaacattcaaagagagatgattatccacgcttacattttttgccccatcgccagcccatgttacttgagtgcactctgaaatcacattattttttaaaataatgtagctatcttggaaagagcataatttttattgcattgtattgataaggctaaaagcattaatttgtgaaatgtaaacatttaaaatcatccacgatgtaactttgttttgacctttttttaaatataaaggattgattatgagaagttggctcagcgattgttgacattttaaaaaaccattactaatgaaaacaaaatatgatagtggaagcttctctggtccctaagaagtcgtgctaagtgcccacaccacacggagtgaatttccctgctcgctgtgtgtcctgctttctagtccacatacatcacacagtagttaagagtgcacactctggaattagactgcctgggttcatgtctagctaggggactgagtgactctgggccagttcctgacctctctgtgcctccccttccccatctgtaaaatgggggctaatactgacacctgcctcatcagaggctgagctcactaatgatacatcgtatgtcaagtgcctggtgtgcagctgtgctctaaaagccttccctaacacaattggcctcagcacagcccctggtccagagggtggagtctgcatacatctcctgcaactctgcagatcccatagtctaggcccttcatctagaaaagctgctcctagagatggtgcacactgcccccctctcctgcaggctccacgcatggcctctcctggacactgggagcatccgtgtggatgtctggaagaaaatagggacctattaccagctgacattttcctgcctccttagacaggaaccatcagataagggtacttccattttcctcttgccctcagaaaggcacagaatcggcggggcgggggggtcaagtaagattttcccaccatcagtgtgctatctatggctgcatttagttttatttttcattaagcaacagcctcttaaggagaagatctcttcccttcttgtctagcaaggagctggaaggacagccctgctcttctccaggtgaaatggctggtcccacctctgatcccgagcgacattactgccccagtgctgaggctcctcttgggaggaggtgggtgctgttgtgctggcaaactcggcgttttcctcctttaacgggaaggccttcccaatgggtatcgagtcctcattatcctctcctggaggggtcagttgagaaggcagcataatgctgtattgagaccctttttgggggaacaggggaaggagagattaagggatgtgcccaaggtcacacagctgtgggatgcagaggcagcatttgagggctgctttctgtggagcagatgagaacttcagctgctaggggtgggaggggcgacttgttcagcagagtcaagtgctcctcctgggcatgttgtctgcgcaaagcttagggaaccaggtgtgtctctgtgtgtgctggtgggagctggtgggtgggatgggaaggtggagagatgacttttgcagtctaattggctcattccaaggacagcctgtcaccagaggcaggtgccttgagactcggagagagacgcctcctcactcccccatgccaggtggggtacagacagagacagactcagccacatgaaactgcagagagagataaacacagaaacaacaaacagaaaaaggaacgtgaagactggcccaagacatagggagccacaggggcaactgagagaagagctcaccagcatccaaagagatgcaagtcagagagaaatacccaaggcaaatgaggcctgagagagtggtccagacttagagagacaggtgagaagccagagagatgcaactagagacctcggaaggcagagatgcaggagagatcttaacccatgcacatggaggcgtgaagatagcaagacaaggagagagacagagccagccacacaaaccctcttattcccaggaagagcagccaaggagatgagaaaacagtttgctgaatgaagcccggcagacctcgagagagtcagtcccctaatggtcaatcagcgcatgactcagaaattggggctggtgagtctgtggcggcagagagggtgctggggtgaaggccaagccttccctctgcacctggacgaggtgcccagagcccaacccaagggtgggtagtacagaccttgcacccacctgctcctggccattttactgagcctcagcagtggcgatgatcattgtcaggaaggtcccagccctgatccccatctgccagctccagcttggcttgcagggagcagacagcctgctctgttgtgccggctcctggctgcacagcctgctgtcgctctggcctccccacaactctgcccctcagaagcttctgaggggaaggaggagagggagcgctgcatgtttaggagatatggcatagacaaaccagatacaccagaatggtcacgttactctgcaagcataaattgagctcaggcaacaggcactaggtaagtgtttgcatgaaggtgcaacctgtttaaaaggaaccttaactggtctgggccagttgtaatgagagagcaccttgtaaatgggagagcatagccaggtgagcttggcagctgtcagattaaaaatcagttttgaccaaaataaatctattatggttctagaaatgccccctggaccaggaatgcagaacaggggctgtgtgactttattccccatcatctcttccacacctggcactgaatgggcactgaatccgttgaagactgaatgagttctaacatgtccatccatattaataactaagatttatctagtgcttgctacaggccagacatttggccaagcacgttgcattatatctaatccggcaatgcctctaagggatagggactcttacattacattttacagttaggaaagtgagacccactggggcaaagtgatttttccaagattacaagtgggaaatgatgcggctggtcttggtacctgggttgcctgaatctagatatggcaatcttgcagtgccattgggcagcttttcataaaacattgttctagttggcacagtttttcatacctgttacctgaatggctttgcaaaccagttagctctaagctgcccccatctctgggttggctactgcagcagcctcctccctggtcccctgactccccttccgcccctccaaatgactccccctggcagcagccagggtgacctcagcaggcaagtctcattagagtgtctcagagaaccggtgcttcccattgcttgtggggtaaggacatagttcctgaatgcagcccaccagaccctaccaagcacacggcctcttaaccagcagccatgagctatcagggggctgagaaatcaatgtcatggcttgtgaccttaaagcaaagacatagaatgagctagaatagaaatagaatagaaactctcagagaggtcacatttaatgtggcaagaataactgcttcatcagtctttttgaagtggatgtatgcaggtaattacacatgtatgcacatgtgtgtgttctacgttccgggtcagcaagcaaaatgtgtttcttaccatagggcatcataaaaaatgtgggaattcagtcatataggagctcctgatctaagctcatgcagcccacacccctttcctcttagctcacagccacatggtcagctttaagcccctttcagctttagttaaagacacagggcttttgcctggaatgttgttcctgcctcttcatttagataacttgaccattctttctttctttctttttttcttttctttctttttttttttttttgagaaagagtttcactcttgttgcccaggctggagtgcaatggcacgatctcagctaactgcaacctctgcctaccgggttcaagtgattctcccgcctcagcctccccagtagctgggattacaggcacctgccaccatgcccagctaatttttaaaaaatatttttagtagagacagggtttcatcatgttggccaggctggtctcaaactcctgacttcaggtgatccacctgcttaggcctcaaagtgctgggatcacaggcgtgagccactgcgcccagcctgacctcattctttcaatctcaactcaggcaccgcttcctccatgagccctccctggccctccccaccccgaccctcacccagtatccacccacacagcaccagggacttcccctttatagcgtttctcactgctgcactttgacatgtgctcaagtacttattccactgatggcagaccccccactagtctgtgctccatggggatgtcacctaggggaggacagcctgtcttagagtgcccgatggggtctgggacaggtttatttttgctaaccatcgttccctgtgtctagctagcaccatgtctggaatatagtaggtgttcaacaaatgcatggagattgaatggatctggagaggcagagtactgctgtgatctttatagatgaggaagtggagccccggagagccctagaatgatgcgcttaatgccccagccaggttaatctctagaagcccttctgctcttcactcccaccatggcatttcgcagtccccaaagtctggcttgaggtgtcagtctgagtcctccctcactctccctgccctcctcaccctcttgtccacagctccctcccactgtggcctctgggctccttttccctctccagctggctgacatagggggtggctgggggaggcacaactcagaaagtgacagcgacaatattaggagtgaaaaagatcaattaagcccatcgagctgatttgtgaagctgattaaattaggagcctccctgggggcagaggctctctcaggttgatagacccagctgctggctgctgtagggtccttgccagcccccagggtgcaatgggggccactttgtcctgctctgtccacggagaggggatgaggggaagctccctttagaaagccctggcagggccaagctcagcacccagcccatggtcccctgtgctttcttatagaatcccctgcaatcctggggcactgagtagattggcctgactttaaaataagatcctgggcctcagagagcttaggtggcctatgcggggcaacccagctggtaggcacaggtaagtgctggacctgggactggaaaccaggtccttctgttccctatgtgttctgtcctctccttgccctgtccccatatccggcttcaacatctcggtctattactctatttttccagtctcaaggctcctgtccccactgcccaccccctccccctttgactggctctaatcagattagctctccagtaacccgatccctctgccctggtctcaggattccctttcatggactgtctccagggcagctgtggccagaatattcttccagtacttcagaatccatccgcttctcctggcttctgggtgggggctggggagagggatttggacaaagactctagtgtgtgtaggggcaatgaaccctggggaggttacagaaatgaggtcggcttctccagagtgcacgagctagggaagggagcgccttgaaagccaggctgcagaatttggccatcctcaaacaccacctttaatggcaaaggagggatgggaaaactcctgaagaccaggtagccatggagtgctacatttctggatggaaaggggaccacacaggtgacacttggagtggcaggtgcccgggaaggagtgctgcgtgtgggttggggtggggtttgaggtgggagaacagaggagggcttcactcaggggtgggcttggggctgggtcaggaagaggactgacaagcctggaggggtgagagtatttcaaagatccctgagggtcctttagctcttggccagagatggggctgcagggggagaaactgacccttagacagggcctgatttctctctctctctctccctccctcccttcctttcttttctttttttgagacagaatctcactctgtcacacaggctggagttcagtggcacaatctcgactcactgcagcctccgcctcctgggttcaagtgattctcctgcctcagcctcccgagtagctgggattacaggcatgtgccaccacaattggctaatttttgtatttttagtagtgatggggttttgccatgttggccaggctggtctcgaattcctgatctcaagtgatctgcccacctcggcctcccaaagtgctgggattataggcacaagccactgtttccagcctgatttcttatacctaggtcttctttcttccttagagcaagtctgtgacaaatctataattaatttaaaaaaatacacacaagcaaacacgggctcagagttgtgtagatgtaagtggtagaatcagaactcacacctaagtctacggggccttcggagcctgggaccttccgtggactaactgctaaaacttctgcagtctcgaagtcagggggcagagctagggagccccacaagcctcagagggccagataggctggtggttaggagcacaggttttaaaattagactgagttcactctcctggctctgcagcttgcttgctgtctggccttggccaagttaatttgcctttgtgtagtttactttctttctctataaagtggggatattaatagtacctacctcatggggttgttgtgagggttaaataaatgtactcccatgaagaattccgaacagtgttgtcatttgataaatgtcagccattcttactcaggatggagccaggatataggggcattaggccaggccagggaaggcaaagacctctaagccagtgctccctgctgtcttcacatgtctgtgagtctgagctacctgtgctggtggggcctgggctgtctggctgcccaaagtggctgacacccataagtcattgtccatctccagatttgagtcctacagcctcttcccatctaactggcatggaaactgaggctcagacaggttgccgcagatctgctctttgatttggggcaagttagtcctagagccctacccccaacccagaatctgaatcctggtccggggtctctaaattaccctgcaactggtttaattttttccaggcggacgccatcctcatggcagaaacattttttctgtaatcttatttgcaactgctaatgagaagcagggccgctttctgtttctaaacctcatccacatctctaatttgtttccagaggctggggctgaggcttcttccatctctgtgaaatattagcaattatttctcaattacttctcatggggaagggattcttggagacggaaatctggaagctgggagaagccataaggatgatgttttgatctgacgtgaaccttgccgagaggcacacatgctctgtcatccctgctccaacttgaaggctaggctgggtggcatatgactctgtccccgtctctttcctcactgagcctccggcccagcttggttcccaaacatggagctgctgcaggtctcagaagccacagagaactggggagggaaagggaggagaaaagtcttctttgtagtctcactaaacgcagctctgtcactacagcttataggatcacaggccttagggtcatccttggctctttctctcacaccacaaacccaatctatgagtgaatcctctgggttctaccttcagaatccatccagaatctgactgcctctcaccatctccacggctcccttctagtccaagccagcaacatcatccacctggattattcagtaacaccctgactagtctgcctgctatcaccctttgcacagaagccagggggattgttttggaattccacttttcacgcaactatttgtccttttagctatagtactttgcattttttaaagtggtttttttttcagttctagagattacacatatgtccttaacttttcacagtcagtttagagttaatactttatcactttatgtaaaatataaacctcttacaaatatttgccatccccattgtatgctatagttttcatatgcattacatctatatacattataaaccctataagacaatgttatcatttttgctttagttatctgcatattaaggaaattaagaggaaaattaacttataattttatatatttagcaatattttaccatttctgatgttttttattttttatttttcttgaggatccagtgcctctttgattttattttgcttcattctgaagaacttcttttagtattcttatagtccatgtcttctggtgacacaatccatacattttcttttaaatgaaaatgtattttgccttccttattaactaatattttcactagatttagaaatctgggttacagcttttttttttctttgccctttaaatgatgttacaatgctccttctgtactcgtggggaattgggttcaggacctccccatggatgccaaaatccgtggatgctcaagtcttttatgtaaaatggcatagtatttgcatataacttctgcacattctctcatacactttaaaacatctctagattacttataatacctaatacaatgtaaatgctatgtaaatagttgttgtatcatttaaaaatttttactcttttttatcgttgtattgttatattttatctttgaaaaatattttccatctgaggtcccatgactgtgttctgcttcaggcctccatagtttctggtaagaagtctgtggttatttgaatctttgttcctctttgtaatgtgtctttttttctctggctgctttcaaggttttctttttatcttttattttagcagtttgaatgagtgtatgtaaatttgttttgcaccaatttgcaaagtgggtgttgttgttttttgccactatttatttctttttttctctttctctctctttttttttttttttttttttttttctgagaaggctgctggtcttgaactcccatgctgaagcgtcctctagcctcagcctcttgagcaggtgggtttgtgccaccatgccgttttgccattatttcttaagaaaaaaaattatgctctcttattcctctccttccttctggcactccaattatgcatatattagatctctgacgttatcccacaggcctcttagacactgttcactcttttatacccccccttcccctgccctctttttttttttttttaggctaaatggcttttgttgatcaacttaagctcacagctatttatttatttatttatttgtttatttttgagatggagtcttgctctgtcacccaggctggagtgcagtggcatgatctcagctccctgcctcctggggtcaaggcctcctgccccagcctcccgagtagctgggattatagctgtgcgccaccatgtccaggtaattttttgtatttttagtagagacagggtttcaccctgttggccaggctggtctcaaactcctgacctcagtgatctgcctgcctcggccacctgaagtgatgggattaaaggcgtgagccatcatgcccggccatcttcattctgttttaggcctatacagtaattgtttaaaatattccaggtattgtattttttagtactggaatttccacttggttctttctatatttttatttctctttagaggtttcctatctcttcatttattatgaatgtattttcttttgccttgtttagcacagttataataactgtggtacttgtctgatagcttcaaattctgggtcatctgagagttgatctccattgactatctttacccttgaggatggattatattttcctaatttcttgtgtgttgattttgggttttatcctggacactggaaatgctatgttgtagagattctggagtttgtcatagtcctccaaagagtgctgacgtctttgtattagcaggcatttcacctggttagactcaaactactaactgttttgcctttagtgggctgcacctcaaatcacagctcagttctttaagccttagttgcaagttgtcttgaatcttctctatgcatgtgtgattcagaagtgagccagatacttgatcagagtttactaacagaatttgggccttttctggcactttcctttccagaaaatcccccttcctttccaggggctctggttgctctaggttctgtcctctggttcttcaggccatataaacagcattttctactggacttttagcagccctgaacaaggccacagctgcagcctgccctctgggtaaagtcatcaaagtggaaaacttaccacatactggtcccttcttacaagtttcaacatccttccaaaatctgcctgcttttggtcattctggtcttttgatcattttgattatttcagagccctccagcaattgttttctgtattatatccagaatttatagatattatttgtggaagggtatacctgttaggagatcactccactccactggaagaggaacttccagagtgtcctttttaaaacttctcagactgtgccattcctcccctcaactctccccactctcgatggctcccattttactcaaaagcccaaatgctcacaatggcctatgaagctgagaataatctagcttcagactgtgtctgacctgtgcccttttacctcacctttgctcattggtggcctctttgttgttcctcaaacatacctgcctgatacactcttacaagacagctccatggccggcaaggccctgccccctccagccccatctttagccatttgccccgactcttgacactccatccccactggtctgtggtcagcctcggctcaggccatgtccttttccaccgtagggccacttcttctgcctgcagcaacctttcctagacttttcttctgtatattattcctactaatccttccctctcgtagaaatgactgcttctggccaggcgcgatggctcacacctgtaatcccagcactttgggaggctgaggtgggtggatcacctgaggtcaggagtttgagaccagcctggccaacatggtgaaaccccatctctactaaaaatacaaaaattagctgggcgtggtggcgctgcctgtaatcccagctactcaggatactgaggcaggagaatcacttaaacctgggaggcagaggttgcagtgagccgagatcgtgccattgcactccagcctctgggtgacacatcgagtctcccactacaagaggtgattggtactctcagggtatgtaacacttcttcataccatatcacacacttaacaatcatttatttactggaaatgctttgtttgctcattaattttgagtgctgtgagggcaggcattccatttgttttcctcctttctgcaccccaggcacccagcacatactaggcacccagtagatacctggcatctgactgtcagggcccagcatggaagccgaggcaggtcagtgaggaacctttaagaagtccttgctgtgtacacagccttacaatgtatgtgggtagctatttcacctccttgttacttttagagaaatggaggctctgagaggagaaatggcttacccaacgtcatgcgactagaaattccagcttgaagcctcatggcaggagagctcagaccagcagagagacctcagattgctcccagccttggcctgcctgtcacacttcctctttgccctggcagctgcagggttgttgactgcacagagtttttcttcccttttcctttctttctctctctctctttccctccctccctccttcctctctgtgtctgtctctggtgtctgagttagttccttatggtgagttcttggtctccctgacttcgagaatgaagccgtggaccttcgcggtgagtattacagctcttagaggtggcacagacccaaagagtgagcagcaacaagatttattgttaagagtgaaacaacagagtttccacagcctggaaggggacccaaggaacttgccactgctggctggggtggtcagtttttatttccttatttgtccccgcccacatcctgctgattggtccattttccagagtgctgattggtccattttacggagtgctgattggtccattttacggagtgctgattggtccatttacaatcctctagctagacacagagggctgattggtacgttttacaatcctagctacagagtgctgattggtgcatttataatcctttagctagacacagagcactgattggtgcatttacaatcctctagctacccagaaaattttgccaagtccccacttgacccaggaagtccagctggcctcacccttcactttctgtttccccaggattcacaactgggctcctcttgctgtgttggagggagatgtttcacctgagcaccatgtttcacatggcagtggggcaaggcactgaggctgtgtggcatggcaccacagggtggccactggtccctgagtcggcagacctggctctcttttccctgccatgctgacttcatgtttatggctaagaagcctctcccagggagcagctgagcttcaggggcattcctggagcgtccaggagagcaatatggccctttgctggtggagaacctgagaccctcaaggagaaagtgaagaaaattctctctgcatacagaccccttcccattttcccattctgggttgactatcctccctcatagatgtgctcatgagtcttggaaattctcttgactcattgccatttaaaatatctgtgttgcttctgatgatagatggttgatttataaaatggtttggctctctttatgatagaatattatacaggcatcaaaaacaataatgtaggagacaaggatatgaggagatgttcaagctgtattctgtgaaaagaaaaaaagattgcagaatacagcatatgttcccattttttttttttttttttttttacaaaaatgtggacctaggtacataatgtgtgctatgcataggaaaaagcctggagaacttgcacgaaatggtcacactgtttttcagtgatggtaagataaagggtaattttaaaaattcctattcttttccagattgtttctaacactgcgcatgcctttcggagacaaattttaaaaataaacattatttttaaaaggaaacaaacaaacaaaaccaaacagaagggaggctgggtttcttggggatttcgggagtgcctgtgtctccacgacctgggcagtgctcttctgagaggactgagggctggggaggcagagagagcaacgacaggctaccagcattgagaaagaaggcctcaaggccacattgagaaggacactacgctctggatcacaggctgagccctgcattcttgacattggagcccttcgggagtgccagaacgagcagtccctctcctggaggagcctgccttcccaccacggaggctaacaccacaacagccacagtgagccaccccttctgcccatcttcttacgtgtcaagcactgtgttcagtgccttcacaggtaacttcgataagtcacgatgggcatgctgcgactaagttggtactgatattctattggttttaaatggggaaactgaggctcaggaaggttcagtattttgctggaggtcacacagccaggcaagggcagagccaagatttcagtttcaatctgtctggcttggaagacttccttatcttgtggcagcatctccagagatcatgggtcagcctcttcttgccagaggcgtgtgtgtgtgcacagacacatacacgctgagtgacagagggacaaaaacagtgagcacccacccaggcactgtgctcgaaattcttcctgcaaacctgcaaggtaggttctaatgatgttcccatttacccctaagcttgcgcggtggcacgatttaccaagcatcaccggctgcccagggtgacctaggattccagctcaggtttctctgacactgatgttgaccctagtgtgcttccgtgtgatcttgcttctctggctactggtgttctgcgggtcttggacaggtgaggcaaactagggccaaatactgccctctgcctgcctttgcatggtccctgagctgagaatgatttctacatttttaaagggttgtaaaaacaaaactcaaagattatgtggcagaaatatacatggctgggcaaagcctaacatatttacttcctggccttttagagaaaaagttgacgactcctagcttagggtcctgaggtccaaggaggaactcctggtcctgcacatcttcatcctccacatttggtggtcccaatgctgcatgcgagctgtggctgtggactcaaagcactgtggtgggggacattttaaaaatgagctgtaaaaatctgccacacttagggcactcattttcccacttatattttggggggatatctgtacccagggaaaagctcagtgatccttgttggatttctagggtgaagggcttttatctcagcatggggtcaagtgcagctatgtgtgggtggcaatgaacttcaacatctagcgtgattcccctgcaaattggaaggcaccagtgccaccccaggcaccagccttgagtgtcaggcatagtgccaggtgcacaagaagaaagcaaggtccctgcggatctcatacagcccagtctggggaagcaggggagcccctcttgggtatccgagttggaagaagaggctatgagaatgggaggaggggcagggaggacagccaggaaatgcaggcggtgacacctgcgctgtgccctgagagatgaggcgttacgcggacttgggggaagggacgtggggaagttggtgctggccaggcgcggcggcgggaaaggccctgggcaaaggggcccagaggggcggcggaaagtggagcggggctgtaggtgtcagcagagacgcggctttggggccggcacggcccgcccctcggcccgcgcggccattgtctgcgccaggcgccgccttggcagcagaaggtgacatctggtgactaatggccgcggctgcgcgccgcgctcctccctcccgcagcgcccggggcgcagctgccgcgccgcctcctccccactcttctcccctccccttccctccgctctgtgggccagcgcgggggcgcggggcgggcaggatcgatgccctggtttccgaagggcagaggccgcccgacctccagccggccgggccgccccgccccgccccaccatcgcgcatgcgcgtcctccagagcgctcccttggcagccagcccgcgaggacgcggctccccgccaggggcagtgcagggaacagtcatgcctccctgcccccggacggcctcactagcggctgcaaacaccggcccataccggagcctatatgcatgtgcattaactcgcaggtgcacgaacccacggtcacacgtgctgtcatgcattgtacacctgtgcttgttcatgcgtgttcacagacgcatacgtgggggccgtgctcgcccacagacttacctccaaaatgtctttgagtgtgttcacataggtacacgcatcacgtgtggactcgcgcagccatgcactgcttacacactcaaatataggaacacccatgggcatgtctatatatacactcacaggcacagcaagtgatgcccttgttcttgccaaaggttgagggagggacaaagcgcctaatttagatctgagacaggatctagtgtggactaggtacccctcttccccagtgtttacactacttataaattagttgcgtttgagaaactacataaaaaacctggagatttcacctatagatctggatttctggcttcttttgcaaaatcagaagctcgggaaaattaaggcatactcccagcttatcacaatgcgctggggctgagctgcagggtatccctcagtctgtgattaaagttcccctacctccacccaaaggccccctccccatgctggttccttcttccctagccaggatttcccacgtggagcctcagccctagccctgactttggagctgggctaactagctttagccctgatgtccacagcaaggagatcctctccactgtatgatgttgggggggggggtgctgccagccataaggaatccctctgcagtctgcaaagtaccctcttcacgcaaggacgtggttcaccacagcagaaccacgtgtggttctgctgacagctccgagagcagagcgctagtgcttccatcttatagttgagaagatggcggcttgggagtaatgatattaccacctagttggaaagtgcagatggggttgcaatcactgtagctgaagtgtgggagggggagcagggttcctctactttaaggtgcccctgaagctggctcctgcctggctctggcacatctgtctcccctctctgatattgttcctctcagcctctggcctggtggggacgcctggttcactgagggagaggccagttcctgaagcttctgggtgtctgcatgatgtcaggctctggctaaactagcgagtggcagcccaagaggcagtggggagctatgtggatgttagtgtcacccactgcccaccagtcctggtgccccttactcctgcatcatctcatccactcaagggctctggctacctctgagggctgacaccctgcccagtggctcacctgagcgcctgtctcacttattcttctccactggaaatctggcatgtccttgactctcagcatgtccaaagccagtctgtgaagtggggtgacctcaggtggggtgtccaaagtgggtatagcctgagctcagatcccagctctccttctccctccctgtgtgaccctggacaagtaattgccctctgtgccttcagtgtcctcctctgcaaactgagaaccataatagtacctgctttgaggattgcccagtgaggattaattgaggaaatttacacaaagcaatctgtgtggtgcccaacacagatccggtgctcagtcaataccagtgctttttaactttagctggttcttccttccgctgctcccaccttggttggtttgtactttcaccaacccaggacaggatgctgagaattactcctgctcctctctttgcatcttccacacattcagtcctgtcaatttgacctccccaatatctctggagtctgcgctctcctctcacccagggtgcctctgctctggtttggtttggtgtcacctctggtctgcacacttgtgtcccctagccaggttcccaggctgcaggctcctcgaacttaaatccagtttcattgctgcctttgaaatgcacatggtgtcactccactcttaaggtgcacatccaagcttcatgacctggcattcactgtgggtggctgaaaggatagccatgggtctagggtgaaattttaggaagtaaagctggatgtgtgctttttctctcaccgtcctgtgtctgccagacctcacatttagcagccagtggacccttcactcccacctatcatacacattttctcccctccatgcctttgcccaagctgtactctctgcctggaaatccccttccccacaattccaactctgctttctgtcttgagctcacctatccagaccctccagcctccctttatattcagttgttacctctctctcatgatctgcttagagcaccctgcatatattgccttgattttgcacttaacctcatttgtcatatttctctgtttacataccacccagaccaatgcttctcaagctttatcaggcacatgaaccacttggggctcttttccaaatgcagattcagctggtctgggctggtgtctctgtatttttaacaagctccctggtgatgctaatggtgctggttcaggactatattttaaataacaaatacttggatagtgagtccctagagggcaatgacttgtgttcagttcatcttggtatccctggtacctagctaacagcttgacaaatggaaaatcaattaaatgcctactgaagtaaacgaatgaatgaatgaatgaacgaaaggcatctcatccagatgagagtgttggaaagtcttttggagttgttgacacctgagttgcattgttagggaggtataggagggagccaggtagagaaggcagtggcgggttgagatactccaggtgaaggtcagtgctaaggcatagggatgtacagaagtgcaggtgcaggatagtgtaggaatggaagacttgaagttcaaggtgttggggaaagagaccaggtcgccaatagccagccctggattccgtgctagcttgtttgatcctagagcctttggagaatggcataattccaaccgtgggccactcctgcagcaagctaggaagaaattccagggaggagatgtaagactgggtagtcacctaggggacttctcagtcaatggtgtggagatcagcccatggcggtgaggatggagtcagggaacagattaaagagaaactgaggaggaagtatagacagaacttgatgagtgagtggaaaagagggtgaaggaaggcctcccccttttactgggaggcacctgggtgagtggtggcactgtagaccgagactggagttcaggaggaggaggagctggtctaatgggaaggctgagaagtttaatttcaaagctggcaggatgttaagagcctgtgggacgtccagagcataggcaccaggagctcctgagagagtccagggctggagatgacagtatggaggcatcggctgacagatgctcactgaagttttgggaaagaatgagatcatccgggaaaatcttagaaataagaagagaagaagggagaggggggactctggagggaaaccattcatttaaagagcaagaattaatgacaacctgttagaagataaaatgggaatagaacacatttataacagcaacaaaaaagataaaaaacctgggaatcaacataacaagaaatgtgcaaaatctaactggagaaagcattaaaatgcttccaagggacaaaaaaacatttgaataatgctcttggatggaaaactaacatcataaaattgtctattctccctcagataatttagaatttaataaggttttcaataaaaatgaagcctttgttgttgttgtttagacaaactgattataacactcatatggaaaaataaataagtgttgagaggcctctgcacgagcagaagtaatgactacctctgttccagactatctttgtaaagacagactagtgaacatgtttggaagatagagatagtgttttcctctggagcaaagagcaatttgtttactgtccagtataacaaagataatgtccccttctagggcaaaaatcaggcaagcttactgcccattgtaaaagatttaggctctctaaactgaaagtttttctcctgtaacacaactcactgcttgtgcaggtatcacctgtcatactgtggcacttggggcttgtgtaaccatcacaaatgctgacactctggctactgctattgccacgaataataaagtcctttgtctctgactcagaagtcttgtgtcttctgccagcacagaaacaggacaggctaacttgctggtttgcaggcagagtaaaaaccctcttagacccttcacagttcttgacaagaagaataactagcaaatatctgaaagcagaatagtaaggagtaggggctaccttgccctgtcgggtattaaaccatactataaaactatattatataaaacaatgtagtactagacaacacagcagaacaaaatcaaattccagaaattacacatatgcattattcaataaatggagttgaagcaactggagaaccatctagaaaaaagtgttggatccatatctcatactttatactagaataaactccatatgaaacaaaaatgtaactgtaacaaaatgataatataataaatgtaccagaaatgtgagaattttaaaactcttagaatggaagaactttctaagtatgacacatgacccagaagccataaaagaaaagactgataattttaactttttttttttttttttttttgagatggagtctctttctgtcgcccaggctcaagtgcagtggcgcgatctcggctcactgcaagctccgcctcccggattcacgccattctcctgcttcagcctcccaagtagctgggactacaggcgcctgccacaacgcccggctaattttttgtatttttagtagagatggggtttcaccgtgttagccaggattgtctcgatctccttaccttgtgatctgcctgcctcagcctcccaaagtgctgggattacaggtgtgagccaccgcacctggccaattttaacttttaaaacgaaacttctgcgtagcaaaaccccaacatacacaaagctaaaagactttgaaaagatttgtaacttatattactgacaaaaagcatatttcctcataacataaaaagtgtccacaaatcactataaaacagatcaataacccaaaagatagatggacaagatataaacagttatcaaaacctaggagaatatgccactttactcataataagagaaatacaattaaaatttcactgagacatcattttcatctctcagtttgcttaagatcaaaacagtggataacacactgtgtggatgggaaaacagacactcattgctgattgaagtgaaaatttgggggtacaactcaatggggggatatctggaatatctacggatgttacaaatgcttctgaccccacaattccacttgtaagaatatatgctatggagagattcccatacatgaaaaatgatgcatgtaagatgagttgttacattgtttgtaatggcaaacactgaaagcagcccaaataggcatcaaaagagagatgttaagacaaatcaggtgcatgcatatatgagtattcctgtgatgtacagatatggaaagattttcaagataggttgttgtgaagaaagcaagacatacttcagtgtgcatagaatactgccattcttgtgaaaaagtaaaggggtgtgtgtggaagaatttgtagacatatgtgtgcatacatgcacacttctacttaatatgtctgtggaggaatatataagaaactgataatgttggttgtctctggggagaggaacctcaccattgggaggcagggatgagaagggaaacttcttgttacacacatttttatacctttggaaatcgagaatacactacctctatagggcttccccacaaaaataacaaagagagtgagcagaagatagggagcccatgacagagactaagcctgtgcaggtggagtctcagagagaaagcggaagagagctgcactggaggagcccaccaaggaaaacatctcaagaaggaggtaggatcctggcctgaatgctgcaaagacattaagaatttagatgaggatttggagacgtgcagtcgatgtgttcatcgggtccatggtgacctcggtgagagtgcgttcaattcaattgagtatgtgactgtgtaagcccgaatgcaatgtttaggagagaacgaaatgtgcagaattggatatggtaaacactttcagaaagcttggtcatgaaaggaagatgagaaggtggaagctgatgggagacagggcagcttgtgggtgtctctttcttctcctcctcctcctctttttcctacttctactccctctcttccttcttctcctcctctgcctcctctttcttctccttttcctccttctctttctccttctcctcttctcttgctcctttccttctgatttttcccttcttttctttttcctcctccttttcctcctttcccctctcctccttctttgtccccatcttctttcccttcctcgcctcctcctcattataattattattatttaaaagaggcaggccgggggcggtggctcacgcctgtaatcccagcaggccgaggcgggtagatcacaaggtcaggagttcaagaccaggctggccaatatggtgaaaccccatctctactaaaaaaaatacaaaaattagctgggagtggtggtggatgcctgtagtcccagctactcaggaggctgaggcaggagaatcgcttgaacccaggaggcggaggttgtagtgagctgagatcaggccactgcactccagcctgggagacagagcaagactctgtctcaaaaaaaaaaaaaaaaaaaaggaggcaaagtgtgcatgtttggctagtgatagcaagctagtaaagaagaatccctgcaagttacaggagtcagaggggactgtctggttatctgttgctgtgtaacgaatcacctcaaaacttagaagcataaaactgccactgttttattatgcttgcaattctttgtgtctggaattctgacagggcacagcagggacactttgtctctgctctacaatgtacaggcctccgttgggatgcctttgacacagagggtggctggcactgtgtgagagcctccacttttctctgcatgtaagatggcttcttcatgtctggcacctgggctgggatggctggaacagctggggtctggccagcatcactcattttccatgtgagttctctacatggctggctcaagcttcttgacagcatactgagggtccctgggtcccaggaccccaagtgcaaagtccaaggttcttatgacctagtcttggaagtcatgcagagttacttctattgcattctcttagttacatatggccaggccaaagtcagtgtggtgggggctatataaggatctgaataccaggaggcatggttcattggcagcagggggcatctttgaatcctggctaccatagggatcatcaagaaagtgagctttttggccgggcatggtggctcacgcctgtaatcccagcactttgggaggccgaggcgggcagatcaggaggtcaggagatccaaaccatcctggctaacatggtgaaaccccgcctctactaaaaaatacaaaaaattagccgggcttggtggcgggtgcctgtagtcccagctactcaggaggctgaggcaggagaatggcatgaacctgggaggcggagcttgcagtgagccgagatcatgccactgcactccagcctgggcgacagagcaagactctgtctcaaaacaaaaacaaaaacaaaaacaaaaacaaaaacaaaaacaaaaacatgtgtctagaagtgcttgattgcctaagaagtatgtttctggaagcgccatgaagtgtcctaactgatgattcctggaattccactgttagtaccacaaatctgtgtcaactcaaactcattagagcatcaatgattcaccatcaaagtcaagaggtggccagctagagcttttccaatgaaaggggtgccccctcctgcccaaagctattctcatctcaatgctctggatcctaatcctgttggatttctcccttccttccttcctttcttcctcccttcctccctccctccctctgtccctcccttccttcctctctctcttttctttctttcttttttttctttctttcttcctttctttctctcttctttctctctctctttctttctctttctttctttcctttctttatttctctttgtttcttccttcctttcttctttctctctcgctctttctctctttctttctttctctttccttccttccttccttccttcctttctttctttctttctttctttctttctttctttctttcttttctttctttctttccctcttctttctttctttctttctttctttctttctttctttctttctttctttctttctttctttctttctttcaaataaatcacccattctgtggtattctgttaagtggccaagcagcatggctcaggcagtcaggacagattgaaagaggagggttggagaaatctagcacaattctattttcctagatgaacttctgagaagtcaccttggcagcatccaacccagctcaacttgcattcgaagtaggctgtgccggcctccagaacaaacttcagctatctgattacctggagaggggatgctctgatggccagagcttctggctttccatcagacccacacagaatgttcactggttgtgggagggcagaatccctgccctcaaatctctcatccatctaaagaacatgcttggagggaaattaagcagaagtagggcatttgcgtgtgtatgcgtcagagttgaggtgagttggcgggtgggggagaggaacaagtgaccccctcccttaacttcccggagggaggggaactattggcaatggccagaaacaggatagaattgtccaaaggacatgacctcagctacaggaatctgaaaacacaagtcacagttcttatgtaaaaatggcaaatttcttaccaggaaggaaaattaaaaacaaaaaagagctatgagcactttagcatgcttttctggggatgacccctctgtggtgggtctcagatgaagcctgccatgaccatatctgacaggctggtgcctccctagacacttccctcgccttctatcctgagtgtaatcccagcgcgctccagaggtttggcctttctgagaagtgagggcatgactcagtcaaggttctattgttgtaagtaatggaaactgacttgagttaacttcagcagggaaggaaattcactggaaagaatctggtttatctcacacaagacaagggctgctgggcctcctgaggcatgggacccaggagtcaacatttgccaaagtgtgttccatggtttgctactcctagcagatgcctgagaaaataaaacgctctgtgatccaatgagttcgggaaatgctacttatcttttttctcttaatatgcacgctggcatattaaaggctctgataagtcttgcagcaagaaagctcatttaagtagacaagcacttccctaaaatatttgtggaataaggtatacttgttgagaaggtgattaaagaggaagagtttcccaccctggctctcaccctgttgtgatggggagctgactttactgtgaagaatatatactagacaggctatatgtctaatggttaggggcatggaccacctgcttttgaatcctgatttcaccacatgctagctgaatgatctaggcaacttatttagtatctctaggtctcaatttactatctataaatcagaggaataataataatatctcttgaggttgtagtaaggattaaatgagctaatcaaactgtttggttcacagtaagtacgaaagtattgagctattattacggattgaatacacacactctttgctatgaaattcacagcactgggggtagctcctgtttaacaatcacttgttggtgtctactcctaatggactggggacacagagatgagtctggtggtatgtcccagccttcatggggctcccaattctgtggggtagaacaagcatattagagattattacaaagagggatggtaagaacagagtactatgacagcccacaggaggagcacctagcccagactgaggggcaggggcgatagcggcatgggaagggtgttgcaggctaacggcatgaaggtgccagccagctttgggcatcccaggcagtctggtgtggccagggaatgaggtgagaagtgatggtgttgaagatgttggtagagactgtcacagggaaggccttgaacaccagaccaaagagttggggtgttattctatgggggctagggagctagcagaatatttctgtcaagtgagtgtcatgacaagtgtgcatttaggaagctccctctggaagtgataggactcactggttggagaaaccaagcctggaagccaagagattagggagagctggttacagaaatcaaactgggagatggggaaagacttggcttgggtgacttgatgctgctgctaattgaattgatgattggtactgatttagatgaaagtcctgagcttgaatcatgttgacttggaggaccctgtgggcaatacaagtctcaatattcaacaggcagttgaatatgtgggcctgaagagatagatctgggagccgagggtatttcaatggtaattgagttcataagagtggatgggattgttcggagagggtcaagatcaaggcaaccctgggtagcttgacccttcaggggagcagggaagcaaattctgctaaagaggttctgcagacacctagcagtccatatttcttacagattcaaattctcagaggaactggtttctctcctcaagagaaacctcccctctcctcaaatcctgtctgtctgtcttgaacccaggctattatgattaggccctagtatgacataatggcttcagggccaagagaggatatccaaggggccctgctcttcactgttaccttgtcattgctacactttgccacaccctgtaccagtttccatctctacaacagggagaactggattttgtcagctgcttcctcccaaaagttgttactacagacacaagaaggatggagtcagcagagtgacagctgaggaagtgatgcaggttgtcctcatttctggggacttatccaaacccttctgcacctttgggtacctgcacccgcagccactacttggttgcggtgagtgctagactagcctgatgagagaggaagcaaggagattttaatgcatagggtttagtgaacacatccaggcactctgttccttccttctactgttcaacctgtagaataacaggcacacaggtgaaattgtcttaccttcataggggttcacgagggttggagctgacaaaccagtttaaatgataatcaattgagctaataatgcccatgtctttccaaagggagaactagtaccaatcgggagtagtagagggagttacaggggaatagaaagtccctcttgatgctaagcatctttagaagtgatgcctggaacagaataggctcttgggcctggattattgggtgacaactcaatgcttccacactctcctctctgcacaaagggctagaagcctgagaactacatttccaggaatctatgaaacataggttccaggttagaatctttccatgagaagcagatgcatgagattcagaagtcagaaaagaagacgaagccatatgggaggtggctcctgccagccctggagttactcaccttcagctgtggtgagtagagtggtgggctttggcagatggcagattttaaaacaacctcaaaattttcctgaagcaacagtgttgggggcatctgtgatccttgcaggagctgctgcagatcctgcaacttttttactttctgaaaatttatagagaacctttattatataaatatccaatgaccttcctttttccagctattccaaaatttctgttaagtgctgtataacatttgctgtataccaaatcacccaaaacctagttgcttaaagcaacaattatatatttagttcacaatgctgtggatcagaatttgtgctaggcacagctgagtggttcttctggtcttggttggactcactaatgcattttacaagaacaggccgaattcaaatttatatcacatggatacagggaagagaatcatcagggccaattttacagtctaccacagcatctatttcttgtattaaataaccttcctgcttcaaagacccagagagtttttatttccctgagcaaaccttgaagatgtaacatcactctgtatttctggtcttggttgggctcactaatgcacaaaggctcactaaagaggcaggtattgagacttggattaagtagtgggctgagggttaaggatttgggtttaagtcctggactgtgccacttcttgcaagtcaaccttgggccagtttcttcagagtcttgaacccttctctctcaaatggacatggttaaacttatgtgcagccatcaagtaaaacaatggttgtaaagtaagtttgaatagattaatgatcatatcctacatttgaataacaccacgctgtgaaaccttcccacctggggactgctggatcaggggccagagggcaggggctgctctggtgggatagaagtcagaaagatgttggtcacttgcttttctcccctcttggattccttggtgtattttggggcttagaagtaaagaatgaatggccagccaaatcttccatttgcagcctctgtgttggaattaagccagagtttggaaaagccctagaactgctggagccaggacaaactccagggctggcaggagccacctcccatccactgctcccatctgccctcttggctgctggtgcagtgaggccctgcttgtcctggcccatcctctccccaggcctcatgtgctcagctgcttgaaagaccactcctcagctccttattagtcccaactcaagctggacatgattcacagggataatgagctcgtaaataaattcctgctgcatcagctcatggagctgaaggttaggctagggatgtgggccagggcaggcagagggaaccaggcccagagattcaaatgtcccctgtgttttctccaggggatatataaggagggtgatgaaaacttaagagatcctgtgaatccatcactggaatgttgcacagtggcctggttatgctctcagtgcagagatcctggatccataatcccatactctactctgctttcagaatccagttctgctagagatagattttttggaggccaatggccagtggctgtgtgttcagcagagcagaaccagggcagcaagctctgtgaagagctgagctggctgctgaggaataggggatgtgttcacatttgttggggtttaccagtagagagaggtcacagggaaataataaaaaaaaaagttcagcacaatcccaaaataaaatgagaggtcctagaaagacatgcacttcctattagtggaaatgtgcaagaagaggcaggaaactccttataagcatcaatgtgggagagtgtgagacagtagctgagggttgatgaaatgccttttgaggcccctttaagctccctgtgtctacaagctgtgtggaaggcaatctgccttggtgtttggctatgcctgcttctgcttaaaacctaccagtggcttttcatcacacttagaataaaatcacgaaggctgggcgtggtggctcatgcctgtaatcccagcactttgggaggccgaggcaggcagatcacaaggtcaggagttcaagaccagcctggccaacatagtgaaaccctgtctctactaaaaatacaaaaaattagccgggcgtggtggcggccacctgtaattccagctactcaggaggctgaggcaggagaattacttgaaccctggaggtgcaggttgcagtgagcggagattgcaccactacactccagcctgggcgacagtgcaatactctgtctcaaaaaaaataaaaaaaaaataaaatcaagaaaaattttcccaagtcagtagtcacttctgtattatttcagactattctccccattgttcactgtgctcaatgccacctacctttttctcacccttaaacttggcctctagttgggatagactgggctgtgctgcagtaacataacaaaccctggaatctcagtggatcagctccttatgtgtttgattcttctttatggactattcatatgggctggcaggtctgttctctgcctagtgactcaggaatccaggttccctccattttatgatgctgctgccccaaagcgtggcatccaatgtggccctggtgggaaatttatttggcccagcattgacacttgtcgcttatgctcacagtctgttggctagaactagtcacacagcccaagcacaaatgtaggggaggctgggcattggaggggagcacatggatattgggtgggcactcatggtctgggcatgtatctgtcagggttccaaattgcaagcaatggagagtgacttcaggtgtttcaagcagaaaataaatttactaaaacaatattatggagtttactgaatctcctaaaaagccagaaaactaagattaaaggtgatgtagctagaaatagcatccccaatcatgctgtagagcagctctgagatgttgctcctgggcgcagacaccatggccatccctgccaacagtgctggcactgaacatgaagtctgccacatagccatagccatagctgccccagagactggatatggttactgcattaaggacacccttgtcagcctgcagcctgtacagccccagctcctttgtgtcactcacttctgactcaaggtctaggatcagcatgtctgattgaggagcctaaatgagccatgtgctagctgcaaggcaggctgactgtattagtctgttctcagactgctaataaagacatacccaagactgggtaattataaaagaaaaagaggttccttttctttttagaagaacactggactcatagtctcacgtggctggggaggcctcacaatcatggaaggcaaagaaagagcaaagatacatcttagatggcagctggcaagagagcttgtgcaggggagctcccatttataaaaccatcagatcccatgagacttattaactatcacgagaacagcatgggaaagacctgcccccatgattcaattacctccccacgggtccctcccatgatacaaggggattatgggagctacaattcaagatgagatttgggtggggacacagccaaaccatatcactgacaaaacaaatatctggcattttacctcctatggaaggccctggttttcaaggggagcctcaactgagagtgatgaatattcactgcattatctcagggcctttgcacttgctgcctcctctgtctacaggtatttccccagatgttctcaaagctggctctttctctgctcaaacgccagctctgacaagcaaatctaatgcagtccccgtgaggcaatcacatccacctgacttgttttcttcgcagcacctgtccctaccttgtccattcatttgtttactgatttaatttctgtctacctgtaagaggtaacaagcacaggccatcgtaggagacaggttcaaaccccagccctgccatttactagctgtgtgaccttggacagcttacttatttgcctttgcggcgcctgcagtttccacatccagcggtggtgtgtgcacgtgtctcggggagcaggttcgggctgactcaacatctgccctgtgctggccactgtgctaggcctctgcttctgtaatctcattaatccccagcacatcattgtgaaatgccccttatttgtgtcctggtttccctcaggctgtgagaggtaatgtacaggctcaagtccacaccacgggaagcagtgcaaagcctgtgtacttcctgcagtcatcacacagcaacccccttcagactccaggcctctgtgtttgggggtgtaagggactgtttctctagttggtgagattataaaataacctccacggagtattcctgttgtagtgggctgagaatcccttcctaacctctaacctttgtctctggctgtaattttatcccagagagaaggggtgtggcacatgggcctagggccgagtgtgagcccaggtgatagaagaaggcagttacaccccaaaggctcactctacccttggagcagtcagatctggggcaggcatttaagaattcaggcacaaaggagaggccaagggcccacaacagggaggcagacatccctggcttccaggaacacatggagcgagacacagtccctcctcctgtatccttgttccttggctgagcacatggaagagggggtgtctccaggcccaaagaggaagcctgaaggttgtgtggaggtggccacctgggagtcaggtggagggctcttttctttgactatgtagatcttatgtactttccttgatgacaggctggatttgaccttctggtcatagttgggggacttttactctagatcatctctaaggactattccagctttgacctcccacctgggtacggaaagagactgaggctctgacaggtgaagtaggtttgccccggtttgcaaatgtggctggaagggaggtggggacaggctttattcatttctgatctcttagggatctctgagagcctggcacagagcaggtgctcagagagcctttggtgaatgaatgaatgaatgggtcctgaacttgggtaacaagaatatggcagggattatgtatttttgttgatgggtgttgtgaacctgtaaggacaggaaggaaggagtgctgaggctgacagtgagagaagatagagggagtttccggcactctggggccgttcactgcagtatcacagcaaacagcaatcatgtgccctggacgggcattcctttgttaccgagaggcacaggaaagaatggtaacacagtggctggtcatcagaaagagatgcaaggatgctgagcgtataaagctgcaggatgcattgcattatgcatgcctgagtcctgtagcttgctttgtaaagcacagtgcttattttaataagtgacaatctttaatgcagtggggggaaaatcacagctttgtagatgtctcattgttctcagaagtgatgcttagcttcaagaaacaccaagttggatgggcagctaggcagggactttgatgtccttctggtttgctttctggggcaggaaaaggatgagttctcctagtgtcttgtacacatcagatgctcagtcaaagtctgataaataaatggttctctccctacatctgatatagtgctgtcttacagtagaaaacctaaggaacatgtgactacattcacccattcatctcctagttgcttgctgacatttgaaatttatttgcagactcacgtgtagtggtgatagataaggcttcatgtgtgggcttgggccctgatgagaactcccaccatggctcatatggtgtgcacgtgactccactgtgctggggtgctttcagagatgagctaggacaaaagaatggggatggtggctgggtggggagtggggagttaggagtgggggagtgtagtgttatgtcctgagaattaacctgggggatggagaacaactctctctgtttcacagtgtctcagaaaagagacctcagggatattcaatttctccttttcctacaaattgctagcagcagaatcaacctgaagttctaactaccctggtcatatatttggctggccatggctgatgcagcagaaagtgtagagcaggagtacttggctgaggtgtagccacacatgtcctctcatggcgggtgttggtggacccttgagtacagatgtggccctctaccaatctaggggtataaaggcagctggcgtctaagcccctttgacctggtgatctccttacttcatgcaagctgcctggcccactggactttgctcatacctcctgagaacaaggtcgtcgctaggggactgtgtctacccccttgcaggctcatcttgtgtccatccctgacactgcttgttttctgagcacttccttgagacatggctgaggcatagtgttcacaagccttccaagcagacccagcccttggggatctggcccagttcaaacccattcctagaaaacccagaattggatctctgtggccacaatattgaaagactagtttttcatgaaaaggatgaccctgattgttttattaaagtattgaaagacatatgaacgtaaatgtctttttaagttgatgtataataatcatacatatgaactcatttatgcctgaggttgcaatttttttaatttttgcaaacagaccttcgtgatgaccttgagcattaggacataaataactcccgcatgcttaatgttccattattggtatgctaaacataaatgggctagccccatttatggggtacatgtgatattttgatacatggatacaatgtataatgatcaaatcagggtatttaggatatctattgcctcaaatatttatctttattttgttgggaacattttaaatcttctcttatagctattttgagatatacgttaaataattgctaattctagtcaccttactgagtcattgaacagtagaacttacttcctctaactgtatgtttgtatccattttccaacatctctttattccctctttacccttcccagcctctggtagctatcattctaagctccacttccatgagatcaacttttttagctctcacatatgaataagaacatgtgatatttttctttctgtgcctggcttgtttcactaacataatcacctccagttccatccataatgctgaaaataatatgatttcattcatttttatggccaaatagtattccattgtgtatatatgccacattttctttatccatttgtccgttgatggacacttatgtttattccatatcttggctcttgtgaataatgctccactaaacatgggggtgcaagtatccctttgatgtactgatttcctttcctttggacaaatgctcagtactgggattgtgaaattgtatggtagttataattttagttttctgaggaaacttactgttttccataatggctgtatgagtgtattagtttatattcccaccaacagtgtgtaagagttcccttttctttgcatccttggtagtattttttttattatagccattctaattaggatgagatgatattttattgtggttttgatttgcatttccctgatgattagtgatgttgaacattttttcatatacctattggccacttgtatgttttcctttgagaaatgtttattcatgtcctttgcccactttttaatgggattatttgttttgatgttgagttgtttgagatccttttatattctggatattagtcccttgttggatgaatagttgtaaatattttctcccattctataagttatctgttcaatctcttgattgtttcctttggtgtccagaagctttttagcttagtgtagtcctatttgtctactttcgtttttgttgcctgtgcctttgaagtcttagacataaggtctttgttagaccaatgttctgaagtgtttcctctttgttttcttctagtatcttgtggttttgagtcttatatttaggtcttcaattcatcttgagttgatttttgtatatggtgagagatatgggtctaatttcattcttctgcacatggatatccagttttcccaacaccattcattgaagagagtgccctttccccagggtatgttcttagtgcctttgttgaaaatcagttggctgtaaatacatggatttatttctgaattctccattctgttccattgctctatatatctatttttataccaatatcattctggtttgattaccatagcctaataatatattttgatgtcaggaagtataatgcctccagctttgttctttttgctcggtgttgctttggctatttggggtcttttgtggttccataggaattttggtgttttatgaaaacttctgtaaagaatgtcattgacattttgataggaattgcattgagtctgaagattgctttgagttgtgtggccattttaacaatattaattcttctgatccatgagcatgggatatctttccatttgtttgttttctcttcaatttcttttatcagtattttgtagctttcattgtagaggctttcacctcctgagttaaatttattcctagggattttatccttttttgtagttattgtaagtgggattgttttcctgatttctttttttcagctagtttactagtgtgtagaaaaaaactaattttttttgacttttgaatgttgattttgtatcccacaactttactaaatttgtttatctagtctaagagttttttttggtggagtatttagtattttttagatataagatcatattatccgcaaagagagaaaatatgactttctcttttctaacttgaatgcctttcacttctttttctggcctgattgctttggttagggcttccagtactgtattgaataagagtggtaaaagtgggcatctttgtcttgttccagttcttagaggaaaagctttcagcttttccccatttagtatgttaggttagggtttgtcatgtgtggccttttttatgttgaggtatgttccttctgtgcttagtttgttgagttatcatgaagggatgctaaattttatcaaatttttttgcacttactgacatataatatggtttttgccttcattttgttaatgtaatgtatcacatttattgatttgcatatgtggatttgcatccctgggctaaatctcacttgatcatagtgtgttatctttttaatgtgttgtaggattcagtttgttagcattttgttcagaatttttgcatctatttttatcagggatattggtctgtagttttctttttttgttgtgttcttgtctgattttgatagcagggtaatgctggcctgatagaataagttagaaagaatttactcctcttcaattttttggaatagcttcagaagaatttgtgttagttttttaaaagtttggtagaattcagcagtaaagctacttcagcttttctttgttgggagacttttcattactaattcaatcttattactcattattggtctgctcaggttttctatttcttcctgattcaatcttggtaggttgtatgtgtccaaagatttaaccatttcctctaggttccccagtttgttagcgtatagttgttcctgatagtctctaataatcctttgtatttctgtggtatcatgttgtaatatcttatttgttgctgattttatatatttgggtcatttctcttttttccttggttagttgcactggtggtttattgattttgcttgccattttataaaaccaactttttttcattgattttttgtattgttttataggtctgtatttcatttagctgctttgatctttattatctctttccttctgctaattttgtgctttatttgttcttgcttttctagttcctcaaggtgcatcattaggttgcttatttgaagtctttctactttttttgatgtaggcatttattgttataaatgtccctcttagcactgcttttgctgtatcccataggttttggtatgatgtgtttttattttcatttgtttcaaaaaatttttaaattttcttcttaattttttcattggtccattggttgttcaggagcatgttatttaatttccaagtatttttatagtttctaaagtttctttttgttatcgatttctagttttattccattgttgtctgagaagatacctgatgtaattttgatttttaaaaatttgttgagacttgttttgtgttcttacctatggtctatcctagagaatgttccatgtgctgatgagaaaaacgtgtattctgccattgttggatgaaatgttctgtaaatgtctgttgggttcatttggcctaaagtgcagtttaaatccaatatttctttgatgattttcagtctagatgatccctataaaactgagagtgaggtgttcaagtcctcaactattattatttgtagtaatactgctgtggtgttgggtgtatatatatttataattgttacagcttcttgctgaattgatcactttatcatcatataatcatctttaagtcaaaaatgataaaaagagacaaagatcattagtctgttttatctaactactcttgcacacttttgatttccatttgtgtggaatatatttttttcatctcttcactttcagtttgtgtgtatctttacaagtgaagtgaatttcttgtagcaaatacatagttggttcatgtttcttttttcccctttagccagtctgtatctttgaagtagggaatttaatctatttacatttaaggttattattgacaggtgaggatgtattcaagtcattttgttaattgttttatcattattttgtatatcctttgttagtttcttcctctcattgtttttttgcagtttggtggttttctgtagtggtaatatttgactcatttctctttctctttttgtcacttttatatctggtctacaaatgagttttatacttttgtgtgtttttatggtggtaggtactgttcttttccttccagatgtagggcttccttgagcatttcttataggcctggtctagtggtgataaattccctcagtttttcttgtctaggaaagattttatttctccttcatgtttgaaggatagctttgcttgttaaagtattcttggctggcagtttttttttttctttcagctctttgaatatgtcattttattctctcccgttctgtaaggttttggctaagaaatccactgttagttgaattggacttccttatatgtgacttgactcttttgctgttttttagaattctctttttatctttgacttttgatggtttggctataatatgctttggagaagactttttgagtttaatctttttggagatttttgagcttcctgtatctgtctatatttcttgtaagacatgggaaattttcagctattatttcattaaataggttttctatactattgcccatatcttctccagtaaatcctaaaatttgactatatgatcactttatggtgtcctatatatcatgtaggttttttcattcttttttcttttcttgttttgtctgactgggttatttcaacattcttttgcttaatctagcctattgttttaactctcaattgtttttaaattttatttattgaatttttcattttcagaatttctttttttttaaattatgcttatctctttgttgaacttctcattcagatcataaattgtttttctgacttatatgtattgcttctctgtgttctcttatatctcaccgagtttcttaaatataattattttaaattctttttcaggtgttttatagatttcctttttgttgggaactattactagaggcttattgtattcctttggaggtgtcattttccttgcattttcatgtgtttttacattgatatctgcacatttaatttaataattacatcttccaattttatagattggcttttgtaggaaaagactttttttccataggtgtatctatagtgttggttgggtagggtgttttggctttgattctggatagttgcagtagtgtggtctttgtatgatttcttcatctgtaatcagcatcagtggtgtttgtgagttcctcggtggcttaggcagtggtcattagtaggggctgtggcaagactttactagggacagggatgctaggcaggccagtcctttggtacccagtggtggtggcagcaggctgagcatgctggtcctcaggcccctgatagtgtatgtgggtgttgttggtcatgggtccaagtgggccagtccttaggccaccaggcagcttgtttggatgccagaattggcagcagtgggccaagtatgtgggcatgtctttgagcccctggttggtgtgtgtagtatttatttgtggtggcagcagtggtggagggccaactcttgggcctccaagcagcatgtgcaggcatgagcagtggtgggcaggtgggtgccagtggtggtggcagaggcagactagatacactagtccctggactccagagaggcacacatgggtgctggtggctggcaggatgggcctatccccaggcctccagtcagtgcattcaggtagttgaggtggtcaggacggacctgtcttcaggtccctggaaggtgtgtatgtgggcactgggaatggtgtacaaggtgggtcaatccccagacgcccagatggtttgtttatatgttagcagtggtggcagtgggtgggtcaagcttgttgtcagctactagagagtgtgtgctggagcagacaggatggatcaatccccaggatccaagacaacccatgtggatgctgatggcagtagcaggcagggtgagtcaattcagcaggtggggcaggcctgtccttaggaccctggaaggtgtgcaagagtgccagtggtggcaggtgaggtggactgattcctaggaccttaggtagcgtacacagatactggcagtggtggcagtgagtgccatggggttgtcctcagtccctaaatggcatatgcaaatgccagtgatggcagtggcgggtgaggacagcctgtcctcaggccctagggtggcacccagatgtcccaatccctagaccccctgaagacacatgcagctagctgcccagtagttttgccactggagtggtcgggggtgctgtcagggatatcagccccaggcagttggctcttaggagcatgtgcttcagctccctttgtctcaggggaagcctccctggggtgctgcaccactcattccctggggtgtagcacactgtgtgggctggaatgctggagacctggcaggagtggccaggtcctggcatcacaacgctgcaggtctctgggtggatgtgtgaaggatgtcagtggggctccagggatatggagatgcaggggatgttgggccccaggacaggatgcagtctagtgggtgctaggatctcaacatggcgctgtgctgcagctgattgcatctcgggggtgtgtggcacccagcatgagctgtctttctggaacaaaaccttcacacagattccacacagctccctctactcgtctcagggcccacgaaggccaaggggctctcccgtggctaggattgcaggagtccatgatgtgggctactgggatctctccttaccttttccttgcagtggggagtttatccaggctctgagctgatcctggccaggccagctgcttcacttccttcttcttccatgcctctgcggctccctgctgcctccctgctgaatcccaccattctctcttagacacgtgagtccacctgtagttatctcctccggtgccaggcacctctattcagacattctgaagccctcttggtaaatgacttgctgaagtatatgttgggcttaatcccagctctgcccctaattagttgtgtggccttggacaagtcacccctctttccctaaccccgtccttgatatcacagcagtttaccactggaagcatagcttccatagagtccacagacctgaatgtgaaatctgcctcttccatctctgagatgcagtgctctgagcaggatttttggttatttttgtgtgcatttgatttgtgtgtttgtactttttttttcttttttttttttttgagacagagtctcattctgtcacccaggctggagtgcagtggcgtgatcttggctcactgtaacctccacctcctgggttcaagggtatcttgttcctcagcctcctgagcagctgggactacaggtgcacaccactacacccagctaagttttgtattttcggtagagatggggttttgccatgttggccaggctggtctcaagctcctggcctccagtgatctgcctgccttggcctcctaaagtgctgagatcacaggcatgagccactgcacctggccatgtgtataagttttaagttctctactcctcttggttttcgttaagtataaaatggcagtggtaagtgcccacttagagtctgtcaggaccacacaagtatattgtagcaataatagcaaacatttattgtctactctgttgtcctggctgtattttgcaggtgctgctcctctcaatctttaaatcaggctggtaatagcatctctcattttttagatcaaaacctaaaaaggtgggaatgaaagaagctcctaaccctcctggcttttttcccaaagccaggaggcagctcctgaatggtggattttggactactggtgaggctgtcagcaaagggcctggcccagagagatgctcaagagtaggatgaaaagaccgtgggcttcttcctctgcaaaaggaaaggtttgggactgatggatgctgaaaagtctagatcttcataatcctcaacagcttcactgccactgcacacacaaaatgagtgtgccctatatttccagccctctgatgaatacgaaaagagcctgaagaactcatcttcctggtcgcaaagtactttaaaatatataatccctcaatcttaaacatacacattttattgctttttattatacaataatacatatttactattgaaaatacagataagaaaaaagaaaatggttcataataatactacccaggtttaaaaaatactattcagccttatgttgaagaatctgactcttttcctatgcaagcatgtatttcaagcaaaactggacacttcatgtgtaccttgttttgtgatctttttttcccaaattaatatataatcaatatctttttgtatcaatcttcaatcctttcttctgtcacttatttttaatggttaacagtcatctactatatagatattctgtaatttattaaagtgatccctcattcttgaatactgaagttgttgataagaaagttccaatcttgttgagaagaccaagcctgtgaggaatagttccatgaaattacaattggaacttgctatgtgctgagtggcagaaatgcaatagagttctgaatggaaggagtggttttggaatgaaggatggtggggaggctttaaagagtacgtagggttggagccaagctttgagagaggggctggatttccacaggttaagagattgtattcgaaataggagaaccagcagcagcaaaggtgcagagcccaggggttgggtaggtgtttaggccctggggagggctcacataggggaccagctccagagagggttagaaaaggaggacaacagattctagagtggacagtaagtgcaagtctggcaagagtaaattttacccttttgggcaataaggagccacagagagtttttgagcggggttgtggcatgagtagatctcggtttatgaagtcactgtacaagcagttagggagagaagagaatagcaggagatggtatccaaggcagggagacctgttagaaggtggggaacaagtccagaggaggtgatgagacctggattcagggagtggcaggaggtgagggaaatgggttggatgtcatggctggagagggcccaaaggaggagcccctggggctcacgaagaggggagactgctgcctgatacctggggtcctgggaagagttaatgggctgcctgtggacgagctaattggtcctccagtggggctgactcattccagcatccaagccagtcattactaatgctggggagggagagagagagagagaaaataaaacaaaagccgagcagtgggaattctgtctgattgaaaagttccagggctggcctcccatttcagacaggcaggattgggaagagggccctgctgtgtgggggtgaatggcaggggtgcggctggcggaagtgacatttccatgatgcctgcttgaaactcatccataactgccttgtgggggtgcagctggggagggctgggtctttccctaaacagcccaggttttctagtgacacccaaggcacactcagggcaagagagtgcgactgaagatgtccacaccagggaggagaggaggaccagcaaaggccaggggtgcaaggtctggttctatttacttaaaaactggctgaaatctcggtccctttgtttgccatttccttgggtttttagatttttaacatgccatggtcaatttcatttgctaagcgagaaatcactgggagcagccttcccagcacagtagagtagggctgtttgggtacaggatgtgtcctggacagtgcccagaggcgctggcagaggcgtaaatgggtgttgccgggtcctcctatcctctctgcctcctccttggtatgggcttctgctgcctttttctgcagcagtggtggagcaaacactgtccagggcttacagggccctggttcctacccgaactcgctggggcactttggcccagatgattccccagtgagggtctcaggtgtcttatcagggttcctctgttacttgaaggcagacggctgaacctgataatgtttgtggcattttccagctcaatgtccctatatagtcatttttctcccatgccacatgttcagggaatgacatctctcatttctatctggtcatcagggatcaagtgaaggccttaccttcaaggctgtgggactcagccccagctagaccctgtgggtctaatttggattgtaaagagtttgtcctcgtaaaagggtgctttcgtgtcctctggctttccatttgggattttagtggtcggtaggcacacatggggccttatgttgtgtggcagccaaatgagctgcatctttgggttgtagggcttggtgtgggaggggtgccactaacacatgctgtgccttgagttctgcatgggtcacatcatgatgttatccccatgcctcccatgcatgggtcacaggcacctcccactcatctgctgcctagggccagtcctattgctaacttcatgttttgggtccagggcctcccctccagaaatcccacatattgtcaaggggaagccagcctaaaataagggccaggccaacctgaggtgtggtggctcaggccaaagggctcccccttatctggagtgcatggaacccctccctgtgaggcttatttggtggctcaggccaaagggcctcctccatcttgaatgcctggaatgcctccctgtgaggtctcagatctggatgcggaacctgaggtgggacatggatgaaatggagcagagaaggagaaggggtgaagcctggaccctgatggaaggggaggaaaagaacaaactggggctgccatgacggggaaggaaaggcccgtgtggaggagcatggagccatctgctcatgaaggaaaggcagggatggggcagaggtgttggggcttccgtgcgactccagaggccaagcccagagctgtgtgtggagcccatgaggagcagagattttccagcaaaggtgcatttgtgggcctccagatggaggccctaccttctcagcaagggaagaaacccctctctctttgacctctctcccctgcacaattagaaggttctgaagagtgacttcattattggtgggtgagtatatgtttattgggcatctgtggtgtgccagatgttgtgttgagtgctgggtgcagaggtaaatgggatatctggttaccgcccacatggggcttatagtgggggaagtgggggagtaagtcaggacacacgtaagcaaacgctagaatggatagatattgtgattagagcattggagagaaagaacaggatgtttcaagaaaggacagcatgaaggactgctgtgtgggatcaggaaggtctccgtgtgtgtggtggggggtgatggttaagctgaggcccaaaggatgacgggagttacccaggtgaagggttgtggagacgagagcacaagcgagggccaggaggcagctgggctcagggcacttagggccctgaggaaggctggagtgggtggcagggggcaaagggggtgctgaggtgagcctaacaagggctgtgggccaggaaacaggactttgttttgagtgcggtgggaaggcatgtggcaggcagccaccttgaggctgggtttccttctctcaagtgccagagctcagtggctgctttctgggaagctggtgaccaggacgactggtgcatggcaaagggcatcaggagactcttctttcctcctccaggagttgagtttctcagtctcaagcaggcagcatgggaggtccccagacctgccctggaaaactcccccagacctgagcagtaggcagcagcttgggggtgctgggttcatgtccaccctgaacctgtgaatgtgaccttatttggaaatagggtctttgcagatgtaatcaagttaagatgaggccacagtggatcagggtgggtcctaatctaataactggtgttcttataagaaaagggaaatttggacacagacacacagatggagaggccatgtgaagatggatgcagaggtcagaatgatgctgccacaagccaaggaatgccaaggatggccagcacccaccagaagccaggagaggcccaagcagagccttccctggtggctgcagtgagagcacggccctgctgataccttagcttcagacttcggacctccagaattgtggcagaataaatctctgttgttttaaatcaccccatttgtggtgttttgtcacagcagccccaggaaacaaatacactgggcccaggaaggggaacctggtgtattaagcctgtcccacatgctggcccaccagcattccttatcttgtttacatgacaactcagagaagttccaaccatgctcttcattttacagaagaagagctggatggtcagagaggtgcagcaatatatcaaaagcccacagagacacaataacaaagctggggtttgagcccaggtctgaattggcccctgatctttctgtaccgcctatctgcagagccttgatggagagtgatccaagagggtcagacaatgatgaggaatcaaggctctgcagcactcatgtatttactggtggaatcccatgcccggcatttgttttgagatgccctaaaagaaaaaagagtaggaatggggatagatgaaagaacagcagagtgttggtaatcatagaagctgggtaatgggcccatgggagttcattgaattattctctttatgtttgctcatctctgaaaatctccacagcaaaaacttaaaaagtaaggccagagagatgcaagcttaaacaaggaaaaagattaaaaactatgagggctctgaaatcagagagcataggattgggatctcagcttcgcccttcattagatgtgagatgttggacaagccacttggccacactgagccttggtttcctctgctccatggcctctcactaggcaaaacctcatgggatggtggaggaatcaaatggtggaattcaagtgctcagcccagtgccatgcacatgggaggcattctagaaatatttgcattattatggttactgagtgtgcaccttacagcagctcaagggtcaagactcccttctttttttgtgaaatagggatgagaatgaggcttagaagtggaggaactcgtctaagatcccaaagctaataagtgacagagacaggcctgacccagaaatctctccctgagctaactgcttccattacccacagagctactcagagacctgctctcatgcagtgtttagggcctttcccacaaggaggccagctttcttccccttggtttagggatcaggccaaggaggggaaggaagatgaagccgcccctggctgaccctggcgagctctggtcactctgtgtttgctcagctgcagggtgcaggtggcaggagcggatgctgagcaccagctgacatgctttcaaaggtgacaggcctgtggtaattgatggtcaatgagggccatggctccatgcacactgttggtttaaggatgacattgatctgacacactggccacagcagaaacagcaaaacaaaggaaggccaaactggaaacaggcctggcctcccttggccctggctgccttggctctgagcattcccagaatgctgtgccctgaggtctggccaggatcctggtgccctggagctctggggtcagccaggatggaggaagtgcccaaggcccccacccatctgggtgcaggtcagggaaggagtgagaaggagcaaagcgggagcaacctcagaggttcccagagctgtgcccacacactgtttccagccttcccctgcccaagtttccatgccctgggagtaaggtggaggagggaggggcctccagaccatgtcccacacagcacggtgcatgcagtggatgtgtctgctgaggagagaagatgcaggggccctgggaggtaggcagggatgggctgggggataagagaggcaaggcctggtggcagaggcctgggtgtgaattcagggctctggcaggaaacagaattcactccagatgcttccagtgaagagacaaggtcattctgtgggcagcatcagggaaattctcaagagatgaggatgctctcagtggctagcaacagtagcacgtcatgaccctccctaaggctgaaggatcagtgggggtgggagggacagtgctagccaaaccccaggagaaccagactcacaaaagagggtgccagcagccactgcctgggaggcggcctgagcaggaaggaagaggggaggaaatgcacaagccctctccttgctcctttccagatccttgccagctgctggagggagccactgatgtagtcagtaggggccacctcccaggctggagcagggcagggaagggcaaggaatggagaggcagcctgggtagaatagagaataccagcacacctcttttctttccctacaatgacgactgtcatacacactgcacaaacccaaggggaggattattgataaggcgtgtgacagtcccagcacaaggcccctcatgtgctagccttgacagacggtagcttcaaactctccatctctctttttttcaaatgtgcacacacacactccacatttcctcaaatctctgaatggctgtcataaggaagaaggagcgaacatgttctgggagggccaagggggagcccgaggacaaattgtgtagctgtcagaattctgtggctcctggaataggcatgccccaggggcactgcctcctgccatgggaagcatggtgctcttaacatgtgcctgctgtgtgtgagtgcagctcatgtcacatgctccccatcctccaatccacaccagctctcagggcagctgatggtcatgccttcgctttgcaggtgaggatgctggcctcagagggacgggtgcttgcccaaggttgtcctggagccaggctatatcaatcaggataggccaggttttgctgctgtaacaacccccagagctcggtgggtcaagacaatatgggcttggctcctgctcatgttacctgtccatcaggggtcagctgggggctctgcatttcaccatccttcctctgggacctaggctgtcaaaactgtagccatctgagatattgttctcacgctggagattttatttggtctggaggtcacgcacgtcacttctgcttacaattcgttggtcagactggtcacatgcccctatccaagcaaaggggccaggatggtcagtcctactacgtgtccagaaggtggagagctggaactattagaagaacagcattagtggctgctacatgagccatggcttcctttcaggcctagggaactccaggtgcagagctcttcctgctgctccaaggttgacgtcaccctggcagaggctggtggagtgccatggcacagtgggaaaggctagagcaggggctgtctcagattcttgtgggctcattctgtggccacctaagtaggatgctgaggaagtcagcagatctcaagaaagatggccctgggccgtcagagcaagatcaggagaggcagcatgtagtgcagagaggagagggcttggtacctcccaggaccctgagcttcctgtctccactctcctgggccacacatggagagcccttcgctgcttatggaggcgggatccctttcggaggctgtctttccagctgcaagtgctctgggcaggctggaaacggtgttctgaagagccgcatgaggccatttcatcagagtgctactcaggctgctagaaaactggccacagagccattcttcttccacaacccctgactgcaactagatggaatttatgtacttgtcatccccattcggtggccaggctggggaaggagaggagtgtgattctacacagtggactccacagagagaggaggtgagtggagtcagtctttctggaagccctgccctgtgcttggccctagaagggcaccacgctgctggttgctgccacatgcattagctcctgtcgctctcccctccctggccaccctgcttcacacactttcactcttcttgaggaagctgtgttccctgccttgtggactccatttctgcatctcccaagccaccaatgactcctcttacacgatcttgcagaagcactcaacacggctggccatttttgatttcattctgttttattcttctgtgccgtcacactctcttgctacccatctgtggaatattctttctctctccatctggcccctgggtgcctgtggtctgcagacctccatgcacagttcatattttctctttttggccgtctaatccctaccatgagcttctgcagcccatcattgatgaatcccaaacccagacctctttctggaattcaaggtatgttcatccatgtgcctagctgacatgtccacttggatatccaacaagctcctacaactgaacatgggcctttcccccaaattgtccttgtgtccagtcattcttgtttcagtcaatggcgtacttatccaccaaccgtggaagccagaaactcgagagccctcccagcttccttcctctgcctgtctccagagtaggtcctgaagcctgacctcctccatagccaccaccaccatctccaacctggaataggacagcaggctctttggtaccttgttcccttcaatccatctccctgctgccacagggatttacaaaaatctggtccaaaaaattccctaattcttaaaacgttcaagggtccctttaccccagttttaaatccaaactcctgaacagggcacctttatgatccaggctcctgtcccttctgcagcctcttctctcccctaccctgcaccccatgcccaactctgtccctttgcacactctctgtttgtcctgcaatgcctttctctgcctcctctctgtttggatggctaattccttctcaacttttccaactcagttaacatatcatttgttttaggaagcttttcttaacgtccccaaagcaagtgtgcctcctccacattcttgtagactcctgtatgtaaacaccctatgggaaggcagagggggtgctgcccctcctctcccgagtgtttttggagggcaagcttgagtccagagcccagcacaaggcttatctggcagtcaatcaattcttgtgaataaataggcaagttggcctgcccccaaagtccctcaacagtggcctcaaatcacagagggaccttggaaatcatgtagcctaatgattcattccgcagacgagaactgtgaggttcttcaaggaggtgaaagttctcagtgaaggagtgaatattgaatctagattggtgaacttccaaacaaagaccacttttattttttaatattgtactatgtaatggagagtttatttctcttgttgactttatacagaagcactgaaagttcatgtgaaatcattcatcaaatacagacaagcaaaaagagaaaagatagaatttgcttagtaattgtaccaccaaaccagagataaccattgctgattgcttggcatgttacctttccatcttttccctgggcagataaatatatgtccatttttaaaaacaatactatgattgcactacaaatctgtttcacccatgctttaaacatatttataaatccctattcatatttgtcaaagactgtatagttttaatgtttttagttgcgctacaatataattcagtaatcagacatgatttttggatcttgaagttggttctattttttttgttattataaacagagcaatgaagaacatcattacagtgaaaaatttggtcaattcttaattactactttagcatacattcttagaagttgaactgaagtagaactggtgggttgaaggatttgcacttttgtgcattttgccaaattgccctcctaaaaggctgactaatcagagtttatatttaccagtttattgtcttgtcaacctgagaggaaactctttgcaccagagattgaaggacttgtctctggtagcaaatttccctccagtcatatgtctcagtatggaggttgtaaactggaagccatgggccatcttcttttgaatccatgatgttttaaaatatttgaattaaagccaggtgcagtggctcacacctgcaactccagctactcaggaggctgaggcaggaggatagcttgaatcctggagtttgaggcttcagtgagctatgattgtaccacagcattctagcttaggtgacacagtgagactctgtttttaaaatacacacacacatacacacacacatataaaatgctggacgtagtggctcacctgtaatcccagcactttggaaggccgagatgggtggctcatgtgaggtcaggagttcaagaccagcctggtcaacatggtgaaatcccgtctctactaaagatacaaaaattagccaggtgcagtagcgtgcacctgtaatcccagctattctggaggctgaggcaggaaaatcactcgaacctgggaggcagaggttgcagtgagctcagatagcaccactgtactccagcctgggtgacacagcaagactctgtctcaaaaaaaaatatatatatatgtatatatatacatacatatatatttgaattaacagccaacttttttctttttttattattatactttaagttctagggtacatgtgcataacatgcaggtttgttacatatgtatatatgtgccatgttggtgtgaacagccaactttatgtattagtaaatttcaccaaaaaaaaaaaaacaacctgaatttctggcctctacttctgaagggcatgtgctgtcacaatttgccatagtctctacctctccctgttgccacccagcctgcttcagtcatttatttgccaggcccctctaggtgttaggatttgtaacccctatatcagttccttttccccatttaaaaatggcccaccagcatataacaccatgctctttattctgattaactacaaaattaattttttaaaaaacaaatcctatttgtaataataatattcaggttaatcatttaggaagctgcttcagagaaaccccgaacgtctttagccaatataaaataccatgaatcactttggactccacagtgcattatgtatttaaaaacagaaaattagacacaggagaattcatcttaacttcattagatatgaaatattaattctcttctgggtttcatattatttacatatttaataacatgttagctacagtctttgactgagagcaattagaggccaggggctgtctcctgccttaatcttaaagatgccaaaatgttttgatattgtgggaagaagggattgctaaggagagttggatgctgttgcctccattcccttgctcatatgtcgtaattggttaaccatgtatttctcttaaacaggatattgatgactttgcctgacccagtgagaattccatttctccattcccatccctttctctgctctagctgggaagaggagattgtggccattttgttttactaaaacacaaagacaaatgttcatccaatatttttggatccctttttgcctttcttaggtccttttagagcctcagtttcctcataagtaaaattggggtaaaagaacaaacgtgctggactgttgtgagggtaaaggggctgaatgtggaggaacacacagacccatgtctcacaaggggctgctgcctggctgggggtaggtcctttctcgctgcatcagtgaactgtgccttgggcctctgcactatccttggtgcctctctgcaccttagcatgcggcccctgtcatcacgtcaccaaaggcccacatgaatgctatcagaagtttgcaatgatgaatgtatctctgggagccacatctgcagtcattgcaatgagaatcaggtgaggctcttcaggccttgggaggctggtgggacaagttcagccttgacctgggcctgggagggagggagggttaggacagaggccctagagagatagggtgtgtatgatgagtgcagagcatagagctggctggtggtgagcttggtgcagagggtcatagagaacaagtcagcctggtgatatgggagtgagggggtgggcagagacagggctggggaggttcaatagattgcttttaagaccagagagtatcaaagttataagggacctcgggaaaagcctagagtcggggatcatcaaccggtggccctagacaagatcatgcccgttgcagatatctctttggctcatctgatgttaactattattattacttttgttaattttcaaaatcttttagatacagcctgcattttccagttacccccagtctcctccactccatccatttacatgacttactggttctagcttccaaccatgcccctctttcgatttgaagaatgagggaactgcagtcttacaaatagaagctgcctgcttgggctgcacactgggtgagaggtgcagcgtgattccatgccaggttgcctgtcacctggtccagggaccttggaggagcttggatggagccctgtggataacaaggagctcctacaggcccagagctgggcattgacgtctgggaatcctgggtatgctacggaggaaattgtgggttgcggggcaggcacagtggtggctggagcccagactgctgtctggacctcagaaccccatacctctccattaagcacaggcttcccaggcaggggctggctcactgcagccagcattgttacctcccacactgctgcctccctctctccctcctcagcggagggccttacgactctctcctccactccttagtgggacactgagacgccagtgtgtctcccagtcacatctccacttcctgataaagacagttatctgcagaatcccaggtggactttttaagaaaagggtttcccagttattctggaatgagacttgggtggttcacggagaactgggtgtgcagagtgctctcaccttataccccaattgagtctatcaggattaatgtcacgctaatgaacacaagaaggattaagcatgatttgtcacttgttgtaaagtgcttccaggcatcaccaatccatcacagccactctccagaaacaagaacccagtgagtctgtgagatgcagtctggggaatcaggatcaggagaatcgctttttatagttaacctgccctggtgatgattccaggaagcagtggagcttgaggctgaggctcaggcacacatgagataagtatgacaccccaaaccgtgctgtaggagcagtgctccttcttccctgaaatcctgaacctttaaacacatcctctctgttttcagcactagaaccagggtttgggggataaaggctgaaggggagtttccatcttacaaatagggaaattgagtcagaggatctatgcagcctcaaatctgtggcagttagagagcagttctagttctggccctgctacctacatgctgtgtgacctaggtttggttaagacccttctctgggccccgcctgtttcccaattcacaaaatgacaaggttagagtggaagatgtctccgctaaaattctaacccatcccatgtgttagagggcatgtggtttttttctttcttttcttaaaaaaaagttttctaaaacagctttattgagacataatttacatactgtacaatttgcccatttaaaggatacaattcaatggtttggggtatgttcacagatatgtgtaaccatcacaattttagaacattatcatcatctcaaaaaaccccctctgtatcctttaactattacctccctgtacccctgtcctgcatccctacccctaagaaaccactaatctattttcttttcttttctttttcttttctggagatagaatctcactctgtcacccagggtggagtgcagtggcacgatctcggctcactgcaacctccgccttccaggttcaagtgattctcctgcctcaggctccccagtagctgagattacatgcatgcagcaccatgcccagctaatttaaaaaatatttttagtagagacagggtttcaccatgttgcccgggctggttttaaactcctgagctcaggcagtctgctcgccttggcctcccaaagcgctgggattacaggcgtgaaccaccgtgcctggcccctattttttatttctacagatttttcatatgaacaaaatcatatagtattttgtgactggtttttttaacttagcataatgttttaaaagttcatccacattgtagcatgaatcagtacttcatccctttttatggctaaataatattccattgtataaatacaccacattttctttatctttttgtcctttgactcacatttgggttgtttccaccttttgtctattacacataatgctgctataaacagtcatgtgtgagtttctatatgtacatatgttttcatttctcttgagtatctacttaggagtgaattgctgggtcatatggtagccttatagtttaatcagttgaagagctgccagacagttttccaaagtggccacaccattttaaactcccataagtagtgtatgagggttttaatttcttcacatccaacactgttatctgatttttaaattccagctatgctagtgagtataagtactaccttatcatggtttggatttgcatttccttaatgactaatgatattgactagtaatattgaccatcttttatgtgtttattggctatttgtgtatctttttttgaagtacagatctattcagatcttttgcatctttattaattgggtaattagtccttttattattgcattgtaagaattcattatatattctagattcaaatgttttatcaaataatatatgatttgcaaatattttcttccattatgtgggctctcttttcacttccttggtggtgccctttgaagcacaaaaggttttaattttgatgaagttcaatttatctgttttttattgcttgttcttttaatgtcttatctaacaattatttatcaagtccaagatcataaagacttactcttaggttttctttaagaattttacagtttttgctctcacatttaggtctttgctccattttgagttaattttcgcatatggtgtgaggtaggcatctaacttcattcttttttttttttttttgagacagggtctcactttgtcacccaggctggagtgcagtggcacgatcatggctgatgcagccttgaccttcctgggctcgtgtaatcctccaacttcagcctaccacttcagcctcctgagtagctgggaccacaggtgcataccaccagcctggctaattttttattttttgtggagacaggggttttcccatgttgcccgggctggtcccaaactcctggactcaagcaatctgcccacctcagcctcccaaagagctggaattacaggcatgagccactgtgcctggcctctgacttcattcctgggcatgtgcttatccagctctcccagctccattttgttgaaaggactattcatattttcccacggaactgtcatattgtaacccttgtccaaaatcagttgatgataggtttatgggtttatttttggacttttaattatatttcattgacatgtacatttattcttgtgccaggaccacaatgtctcgattactgttgctttgcagtaagttttgaaatcagaaactgtgaatcttcctactttgtgcttctttttcccagattgttttggctcttctttatcctgtccaattccatatgaattttagaatcagtttctcagtttctacaaaaaacccagctgggattctgatagagattggcttaaatctgtagattggtttggggagtgttattatcttaacaatattaagtctttcaaatcatgaacgtgagatttttttttctatttatttagatctttaatttctttcaacaatatttttttgttttcagagcacagttttacatttctctttttaaatttattcctaagtattttattctttttgatgctattgcaaatggaattattgttttcttgattttatttttggatttttcattgacagtatatagaaaaaggattggtttttgtatattgatcttgtatcttgcaaccttgttgaacttgtttactaattttaatagttttagtgaattctttaggattttctctatataaggtcatgccgtcttcatgttttgcttctttctttccaatctggataacttttatttctttttcttgcctaattgccctagctagaatcaccagtacaatgttgaataggactggtaaaactagacatccttgccttgttcctgatcttagaaggaaagcaccctgtcttttaccattaaatatgaagtaaggatgggcatagtggatcacacctataatctcaacacttcaaaaggccaaggcaggtagatctcctgagttcaggagtttgagaccagtctgggcaactgggcaacatgacaaaacctcttctctactaaataaataaataaataaataaataaataaataaataaataagcaagacagccaggtatggtggcatgcacctgtagtccctgctacttggggagctgaggcgggaggttgaggctgcagtgagccatgtttgtgtcactacattccagcttggttgacaaagagagtccctgtctcaaaaaataaatgaagatagctgtgggtttttcatagacactctttgtcagactgaggaagttcttttctattcctagttcatttcatgtttttgatcatgaaactgttgatgttttttcaaacgatttttatgcatctattgagacggccatgtgatttttgttttgttctgttgatataatgtattaattaattgacttttcagatgttaaaccaattttatgtctctgggataaatctcaattagtccatggtatatgattctttttatacgcttttatatgttgctggatttggtttgctagtattttgctgaagatctgattattgcatctatatttataagtgatattgctctgtggttttcttgtcatgtttttgggtttggtatcagggtaatactggcttcataaaatgagttgagagtgttcccttctcctctatgtttttggaagagtttattaaaaattggtatttgttgttttctgaatggtggaaggcagtggtgaagcgatcagagtttggggttttcttgttggatagtttaaaaattactgatttagtctctttacttcttatataggttgattcaggttgtttatagaggcacgtaattttgtgtgtgggcccttacacagttaaaagccttttgtggggcctgagctccgtggatcatggattactgcagttactagtaagtccataggggtcttctggttaggtaaatagatggcttagacagaaagtgggctgtaatttgggcgtctcagtcctccagagcctggagaagatcctgcaggtgggtctgcatgctgagtgcggcaggcagggtcagaggagaagggctattttagtgagctgaagtgggagggatgggtgtatattgcgattctagctagaaggattgctgtggcagggccctccagctagtccagctggtgccttcctgacatgtgtacaccccttccatccacactccctcccaagtagtggctgtgtccctagcactctgggagtcgttcagcaccacagaggaagggaacctctctctgttattatcatgtatccccagctccctgttgtgggtggatgtacatggcagggggtccaggtcgcccagaaggttctcaggattattttttgaatggaagaatggtcagaactgcctcttggttcttgtctcccagcaatccgcaggtatacctggcctgaagccagaaagccaaaggggtccaactgtatccaaaagcccacttttctaagtaaatgtgcatcaggtgtcttaaccatcaagcatggatccagaaacgcttatcactgtctgtagcatatgcaaagcactgtgggagataacataatgtgaggtgtctggtctctgcccttgagatgctgacaatgtagttgctggaaaaacaccagtggattcagttgaatgagtccttagatggcctctcaggctcagccctgtaatgatcaccattgttgttcctgcattcctggttccggtaagagtgcccggcatgctgatgctgattggtgcagggactgcataagaaggcccttcagccctctgggctcttctcattctccacttttcttgatgggtggtccaatttctgaaaatatgcccagcttctactttgtacttctgcaattgtctgcctcagccaagtcataactgtctcctcaccacccccaactcctgggacattgtcctggcagccttcagcctctggtctcagtctcataccctctcagaaaaggtaaatgggatgcacacacacacacatgtgcacacacacgaaatttctcaattctcccaccaagtggagagcctccaagttccattccttaccatccactgtggcttaggggctggagattttggtagcctcttcttgagacaacaattacacatcaatctcagagggaggcattttggaaaaatgccaaaagacttggcctagtttggctgagctcacctgagagccgggtgttacctcaggcaccgttggagaaataggctccacagaggagccacgggggtagttattctctgttcaggaattggagtcagtctctgttaggtgtgtgaatgctgagtgatggagcaggaagtgccatccttaccatctcaggcctgggctggagtgtgttaaaggtggctcctgcctgccgggggaggttggcaactctctcaaagcagtgagcacagattccacaacctatctttgcgcagtgctggctgctgatcttgcggatggggactgaaagttctgccctcacgctcctctggcatttcagtcctgacccaggtgccagagtcctgggttggcaggcattctgggcaagccagagatggctccactctgtgaaaggtcagtcacttagttgacaatattaggtggtgctgactctgtgccaggtatactctcacctgtggttctcaaccagggtctattttgtgcccccccaaccttacccaccaggggacatttggcaatgtctggagacatttttgattgtcacagctgggaggcagtggctactactggcatctaatgcgtagaggctggggatgctgctacacattctacaaagcacggaatccgtctccacagcaaagaacaatctgccccaagatgtgaacagtgctggggttgggaaagcttgctctatacagtgggctcccagaggtgttggatctggacaaaatccctaccctcagaaaagctaggcgctagtgggggtggacagatcatcttagagctggtccctgtcctccaagtggtgtcctgaagacagttcatttgttagtttcccccttgagttttttcattcacttgttcagccttcacaggttgaggttttttcttgggatacagaaatggcatggatctggtgcttcccctcaagcagcccatgtccagtgaggaaccaaagcatacacatcaacacgcacatacacaaacacacacaaatgcatatatgcatgcatgcataagcacacacacgcatgtgtgcatgcaattccaacactatgcaataagggctgaggtggatgaatatctggagactgtaggtgaggaggggtttgtagctcagccttgaggggtgtcaaggaatgcttcctgggggaagtgagctgaattttaaaggacagggagaatcagtagggggaaaagccattcccctaagaaagaactaaccctctgtagaaacccatgggcaagagagttcaatttcctgcaggctctgtggagcagccagaggctgctataaccctctgccacaatccacactaattgctccttcctcctgtgacaaggcatcccctctcccctctgccccacagcccctcccccatcacaccttaaactcatctgtgaaattgcatttctcaccctctctgcctccagcccctccatcactgccaggagaggccatcagttccctgacccagccccagccctcagatgggagtcagatggtgccctcaattattttcctaacaaccaggaggatttgggggagaagtagagaaggaaagggaagataatgtggcttccaggggcttgaaattggacagagtgcccttttatacctcctgactgcctttggtatcttctctctcatatgtaaacagcattaaacataatgaaaggccaagccctggaaggccttgctatagagtccattggggagagaatcaaaagatgctcacagctggctgtcctgggaagggtctagtggaagatgctaggggtctggggttagcaaaaatggatctttgtcatggctgtttcattgtcttgctgggtgacctcaggtaaattacttcacctttctgggccacaagcacctctgctgtgaaatttggagggagcccatccccaggatatcgtatcacataacaataacatctggtgacatcactggcctttaatagacaggagcaaagcacggaatttgaaagaaaatatgcctgcatttcttccttctcccctacagcccatgttccccagaggtattagtggccacagctgatagctgatgagtccagctgaggtcgataggatacatcagcattctccagataagcttgatgcgttcatgctcccgtaccttaacctatgccattctgttgcccggaatgcccttcctgccctctccccacccttcccgaaggggatattctatcaagatctagctaagaaggcctcccctttgggacgcctccttgaccttccctggttgctgtctcttctggcccccaacaaactttgcttgctcctctgttccatcttcaatgtttacttttgtgtccctggccggtaacaaaaatccaatagctcagagtgtgtcccgccatggtgcggcaactcgcatttcatcagcaggtgagctgtgactgtcaataaaatattgcagctaatgactttggcatggatctgggcatttctatgccgtgacttccccctttcacttgtagccaggacacagagatcacaagagagggctgtgcattggaaagttgatattcctgtgtatcttggaggaggaaaggatggaccctgtgaactggcaaagactagttggagacataatcacagacaccttcagttgggctcatttaattgccacggatagagacctgctcaagcacctggagaatacaaggctatcatggggttccagatgcaggacttgcaccctagtggggcctcacaggattgagcccagtgaggaattacagtgctgtgtggagcagcttctttctgttcaggtgttactgcttctccctgcacactggttctgccctcctccatcctcagattggcttcctccttctgttcataacttccactccctggaaacttggatttgtcaaagcccagtttggctgagcttctccattacatgcctgtgaactttgggctcctggcccttttgctacgtctcacagtttcctagttctttggatctcaatttctaagaaaggaatttataatccaactcaatacaacaaaggttgctggccaacgaatggatgcagtactcttggatcagcaccagggcttggtgtctggtggacagggtcaggtggtacagaagacgatctcttagataatggtggttggggtgaggcagattatttttaagggggttaggaaaaagcagggagtattatacaacactgatttttatacatgagtagctactgtgtggcatatgacagctaaaagcatgtgaggatggatggatggatggatggatgaagaatggatgatggataatggatgatagagtggaatctctttgacagaaagttgaaatggttttgtagcaccactttctagattatagtttataatgcaagagaggagatctcatatatatatatatatatatatatatatatacacacacataattttatatatgtatagatacatagatatagatatatttaatagtaagtcatatctgcttaaccagagccatacatggccatatgctgtgcagaggaaccaaagatggataccacatgtggctttggggaggactagtgtaaagtctaccaatgtccaaggcatggccttggtagaaagaggaccactactgctactcactgaccaagtagtcctctggagtggaccaggatcttctagccttcaaaaaccctttataacccccaaacagcaccttcatcctgtcatccaggctcaaggtgagtcatgtgttcccactgtatcaagttgacactccccatgtggcattggaaggttgcatgtgtacagcattatcagtcccactccctccactgctttggccacacctcctccctgctattccacacactgtcttttctagctgcagccttaagtactggccaacaatgttggcatgcttagaatacaccaggtactgtgcttttctctttgctcatatcatagtgttttaagctttacaacaaccctaaagggtagtggttattctcctcattttacagatgaagaaaccaaggcccagggacttcaagcaaccataagcaacagccaataagcagaagagcctcttctgcactgacttgtatggacttccagccttgctcattttccttttgcagcctcaaccttatctagattttaagagacagccctttttgtacttcctcccaccccgcaccctcacctcttactcttattaagtttaaagtgcaaaaatgatgcaattaaaacctatattgcctctcgaccttttacttgtgcccatgaaatatctaagacccgacattcagaggtgaatacacacctcttcttctcacctccagagctgggcaatattcaaactcaacatagaccagtggatggagaggcgattgtggtggaggaaatagctatggctgggtgtacatccctggttctgcaatgactgatgaggcctgcgagttctgtatggcaccttgccaggcctctattggccctgccattggatggagatgacccttgtgtcctgctgaccacacggatcacatcatcccctcatctagcttcaaaaataatctaatcaagacatctgttaattctaagctctttccttctctggcctctgggggcctcagttccctcatctataaaatggagaggtctctttctaccggctggctctgcggacttgtgggaattggtgccaggcatggggcttgggtgctttccttcccccggctgctaaaggggatgcccttagaaggcagtcatctcagctactggtttgcactgtcttggcctgacctccaaacctctggatgtgaaacctttaacctcttatccagatgtgctgttctggtgtcaaacagctacatgtttgggaataactgtataaatgctggccaaaactgaggccataaccaccccacccccaaaccagagatttatgctcactgactaagatttatgaaattgccgccttatgaatagttcacgggcattcagggtcagctgaaggtttttagaggaacatttgggagtaattttggaaacattttgcttctttctcttttctttgcaagtggtaagaggagagggagagaagcccaggaaccatccctcccacacggctaaggagggaaagcaggactccatagtccctggctcctcctggcagaatttatagtccgcagcctgcaaattactggagggaacatggaaacctgggtaatgatgtgggagagaacattctccagtgctgacgtgggtttccctgcgccagagaaccagagatggggtaattgaagctcatgctccgaacagttatagcaaaggtaatttccatggcggcatttgaaatatccccagtgcacagggaggagggtggtggcggggaagccagacctgatgaatgagacagaatcatggatgctcgggcttggacccatacaaggccccagggtctccagaaacttagaactaagttgggcccttactcacaaaatggggtcctcattgggtagtagaagtaggatgaaggcgagcctaaagcataaactcagcaaagggagggactctgacttttcagcaccatatccttggctccaagcatggctcctgccacttagaagatctttaatattttttgttcaatggatgaatgaatgaatgaatgatgggtgaataaatggatggctctagaataagtgaattgacagttctgttgtgttctacctgtgttcatctcatggcttacaccttggcttgcccagaggatagcagtcagaatagtgaggtgatgcttaactatgtcattcaggaggcagtagaaagaatgaggggtatttaatggttagcataacagtttcctgtcttcaagtttctgaacgcaggagacactagtgggttagagctagggccaatgcttagaactcagaggcagatctggggtcccccaatatcattgctcacattgattgagtgcttcatatgtgctgggcatacttttgccattgcagatgatagacactaaggcttagggagtatataggtttcctgggctgctgtcacaaatgaccacaaacttggtgactttaaacaacagaaatgtactgtcttacagttctgaaagtcagaaatccaaaatcaagatagcagggccaggcacggtggctcatgcctataatcccagaactttgggaggccaaggtgggtggatcacctgaggtcaagagtttgagaccagcctggccaacatggtgaaaccccgtctctactaaaaatacaaaaaatttagctgggcctggtggcagatgcttgtaatcccagctactcgggaggctgaggtgggagaatcccttgaacccgagaggagaggttgtagtgagccgagattaggccattgcactccatcctgggcaacaagagcaaaacttcatttcaaaaataaaaaattaaaaaaaagatagcggggttgcattctgtctgacagctctagggaagaatccttccttgcctctcttagctcctggtggctgttggcaatgctggcactgctcttggctgtggactcatcactccattctctgcctgtcttctcatggcctgctcctctgtgtcttgatttggattgagggcctactctgacagtccagtgtgatatcatccaaatccttccttttagttacatctgcaaagactcttatcccacataaggtcacatgcacatgctctgagtatgggggggttatggactggatatctgcatccccccaaaattcatacattgaaatcctaacccccagtgtgatagcacttggaaatgaggcctttgtgaggtgatgggattagtgatcttgttacaggagaaaccacagagcttgcaggaagaagaggccatgtgagtagagagtgagaactcggctgcctatgagcccatacgaagaagcctcaggatgaaagctacctgaccaacaccttgattttggactcttctagaacatgggaaataaatttttgttgttttataagctacccagtctgtagtatttttttaatggcagcttgagctgactaatacaggaactaccattcaacccactatggagtgggccagtggtggtggaggtcaggggcagccaatgctcctcttctcttccccatgggagcctttgagagcctttctgactttccagcatggacgccacttccccaggaggcattgagttcttatgcgggcgttcaatgggctccacagatctgggacaatgtggtggggtccccttgaattctgtgattgcatggtagcccctgaccatgccccttacgttttgtccactggcagcaagcttaaaccaactggcagtggaactgaaggcaagtgtctaacatttatggaggatgacaccttctatgggagcctgactcgtgacctctgtgggtatttttggcccagagaaagggctggtctgagctgtggctatcagtctaatagtattagagggtcactacagagaaggcagttataaatcacccagagtgggctgggaagtgagtggaacctttctgcctcttttggaagactcaacctggggaaaacatttcatgtcaagggtgggagggggaggtttcttagatccctgggctcggccaaatgtgaagtcagcactcccctcccaacctccccgcaatccagccttcctcctgtcctcccctggcttctataattccgtttgttgtgctcgcaaacaccgtgttggaagatttcatgctaatgaaagggtttcttgattaggttacgctgttactgtaaatgttccctcattatctatgttatggtaggaatttgaaaaagtataaattgagcgtcttgcataatttataaaacctgaatgtttcctaattagttcggttaggttaatgatggtgcagcgtcacttcttcctggtcccgttaatgacctttccactcttcattttgaacactttctgttatttacaagccccctcccaacccaaatccaacaaccagcttccggagtgtggccccatctagcctctgatgggaggatgaaatgccttgcagaatgtgaatggctccttttttctctgcatgtcccccgcccagctttgaggccaagaggcagcctgtttaaaggttggccagcccaaatttggctcaggccaatcccctgaagaatgccggtgaagtgcattctttcggcatttgtatagagattggtgctgtcccccattagcagccagagatgtgaaaatgccggaggaggtgggggagggaaaaaccctctcaaaaggattctaaaataacattttgcatcctcaagtaattcccagttctccctggcaaccattcatttcttccgaacagcagaaatttgcaatatgaaagtggattggcttctccctcccttggggcccctgtatctcttcatccagcgccttgggtaaaaagcaatgcatacgtttacaatataaatgtgatttaatcgacctccctgtcagggagaaatggcaagcatatcaaacaagaccaagatgttagaaagaaaaatcataaattattccagtgacgagtttcggagccgcctcccagactactagctgatgctatataaggctgttccttgaaacaataattaagataattctgtatgacaaggagaaaaatgtccagctttgtatgaaatgtgcttcatgttagcaagctgaatgcttggtattgattactctctccccacaatctcccccacccagtcgctgtgattcaaggctaaaattaattgaatgatgcaacatttcttttctcgaatccttatttaccgtacatgcctcctagaagccatgcaaagtgggctggcctctaattctctaaattgatctcttcctttggcagtgtctgggagaatgccgacatgtacgcacacacactcacacacatcctcagctgggtgtccattgttctcctctctggaaggtatgattcccccctcaggcagatttgagggacatatcagtacagtacagccctcactattctgttattaggccaccatggggctctcctacagaaatatggccaatgccagaggtccctcaatgcagaaagctgcagacgggactggctcaccccacctgccaccctttccctgcttgcagtccatagaacagcatctggcctctgtctagcagaacatccattttccccctctcccccttccaacctcccagggtatggtgtggatcaaggagggacctcttcgctctcccctctcctattctagctgccatatcctgagacagtcgtcccccctcctatgagaggcactgggcaattcctggcagagagagatggtttatggcctcagctctgctggtttttctgaggctctatttcatcttgactgcagttgctgccgcagtggtggctgggagagagagcgaggcacagcttcaggtacttaatccacagtacatcccctgggcacccgcagcaaggctgatgccttcccctgcctggagaagctgagagagtagtggtaaaggtagcgactgcaggcaaggtgcccatgggcagtggtttgcccctggagccaggctggggctggattccagcatctctgggcttgttgggttactgaacagggcccttcccaccctgaacccagcttcttccctgcagaaggtggtggtggggattcaaggtggaagcctgtgatgggcttgacacgttgtgcacaatcaatgatttttaaaaaatcagagacatttagacaattgtgcgatgagtaaatggctcttggtttgacaatcctgtttgtgacaacccagagccttgtccccaggaaaccatcctttccagaatgatgacagagaaggactcttgttttctgccctggatgtgagggggtggttgtggttccactaagccctgaggaaccatcctttggggacaggcaccaaaggtgcccaaggaccccatgccctagtcttcctcaggagacgtggcatcatcactcagctgtagccacagctcatgaagccagatggtgataagcacattgcacggaggctgaagtgggtgggccgggagaaaaggcagcgctggtgcccagagccgactgctatgggagagagggctgcctatgtgggctcagagttgggggtgaggagtctagaagataggatagggagaaagcaggcagccagtgggagctggacccatggagcattagtaacccattaacccatacccttaaattagcagataactaccacactagaggctacactccaggataagggctgtgtgaatcttgtccactctcccagagctgagtacagtgcccagcacatactagtgcccaataaaggagtggagtgataggtgagggcccaggaatccctgctgaggggagtgggtgccaaggcatcagtctggaggactctgaggctgttgcaccttgagaatgggttgttgaaaggcaacgtggggaggctgtttgcagccagtttctctcctcaccctccctctgggcggaggggggctagtgcagcatctagaaggcttgagtctcacttttgctgggagcctcacatctggcacgaggcctgggccaagcagtgtctgaactgtcctcctctgaccccagatgatccatcaaatcctcaggcatctctgaatccctgcgcagcctggtaccccgtaggagctcaacaaggactcctgagtggttggctgcttgacgaagaagcagcccttctctgttgatgaaagagcaattaagactttaggagtctgcagtctagacagggagctgtcaagtctcacataagtgggtctgggaactggtaataggagattagggggggcttctggagaagagaagctgctttagaggtgagcaggagggagcctgggggcgggtcccgggggttgggtcctgtgcattgctcagcgggagccagcgtgtcgaaagttccaacccctctgcctgcctgctctgtgtgtcttacaggcttgtttttacactgctttctttaatgacttctcaccatagtcaaaacaactctcctgtcaacttattaccttaaaaatagttgaaaagatgacacttgggtagaaagtgctttaaaagaacagctactttcccacacgctcctctagctctgccttagagaagagtcttgtgtttggagacctgggttttaatcccagctgtctctcaaggtgactatgtgaccttggccaagtcatggtacctcttggagcctcagattcttccactgtaaaacacggttaaagctcattggtgcataggaatagaacattcccaatgtttagctccacacctgtgtgttcagcccattttctcacgcagctgcctgggaaggcttcctggaggaggtggcacagaagctagttgctgcgtaaaagccaaggccagcgagtttgaccgctgcaagctgagcttttgtaggactcccagcagtaagcctgggtggcagccattccctgcctcagttcctggaccttctcgtcattgcctacctccccatccaggaggcatccatccctgtaccctttcctctgccttgcttctctggtcctcagaacagctccctgccacctgcaccctcctggctgggagaagggtacagcctcagctctcagaatttggaagacttttaattgctgtcttttgtccatggagattagagtgactccagcttggagacaattagtaaattattatgattagtttccatttgtgtggtgctaccctttgagaagcccagctgatttaatcagggttggttaatgggagcgctagcagctcccctcactcctgacgtgccttggaaaccaagagtgaatccatagaccgtgttcacaggagctcagcattttgtgctggagtaagaccctctgcattgcaggatgccttctgctcatggcttcttgccccacgggtctttggggagctgaataactggagagagggggacgtggggacgtgggcctggatgggatgtcagggacctagggtgtttgcctggaaagggcctcactgccccatgctcccacagttctccttaccccacagcccacaccaccacttcctccctcctcccctgcttcaccttctctcttcagatagactctagtccagtggtttgcagactttgactcatgtcagaatcacctgaagcacttgtcaaaaccaattgctgggccccacttccagggtctctgagtcagtggaggaggggcagggcctgagaatctgaattcctagaagttcccaggtgctactgctgcttctggtccaaagagcaacctttgagagtcatcttttcttatggttttcaatcccgggtggacattcgaatcccttgaggagtttttaaactgatcatttcccagccctctgaccaggctgggttctgttggtctgagcagggtcagggtagatattttttaaagattctccaggtgactctgatgtgtagcttgggttgagtgggggccctttcctggaatgcagacctatttccaggagttcaggggagctcttgcccagttgctgagaggctcagcttggattagcaatacgtagcaggatgtggacacctgggttctggctttagtgcctgcttctgagtgttgacttctgatgtccaagtctaccttcccttcctgccccattctttctttcttttcctttcttgcaacacctctttcatctgcctctctttcttcccccgtaactagtttagtgaagatcccacgcagtggaatggagttattacaaggttttgttttctcttgtccccctcactctgttgactccttttgtcccataacttctggccactttcatgtatcaggaccttctctggtctgacaagaaacagcagtctcaccgctgtgtcaaacccgtctccttggagtggggaaggagaaacggctttttcatgttgaggccattcttcttcctcctttcttgggttttccaggatgggaagggtggagaccatcttgcttcactcgcctcctctcagtgaggtggccggcttttgcttgggctggttaaggctgcatctgcctggtgtgcgtctgcccgtcccagtggtggctcctctctagtggtagtctccatgcagaaggtgagtgtgggttcttcaggggcagcgtccagcttcacttcacctctctcattcctgagtgtgccctcaggaaggacctcatctgggtggcagccacctgggcagcccacacctcctgcctagctctaacttccgtgcttgtgtatgtggagactcaaggtcctctccgcgggtcctttctcctgggaaagccaggaaaaatgaggtcggtgatcccccatcctattcccagccctctaaactctggtctgttttcattttgcaagtgcaggcctctacagcaagctgcagcctccttcctgctgagactgccagacaagaaggcaccacttcctgtgttcacattccaggggcgtatgccatgccttcccctaggccgcacttgccacttccgcattcagctagcgtccagctagggtggggaggtgctgatcttcttttgctggaggcatccctgtctctaggcatgattctcctggaggcctttctcctgcttggcttaggggaggagagcatttttctcaccatgaattcttcccttgcgctaggccatacgactcagcagttttgcctcttgcctatcctgagtgcttctagatggggacaggggtgagatgaagcagagggcagttggtggtcatcccatagacagcctgctgggcctgcttgtcaacagctttctcagcgtggagttggtgtttcttcatcacattgggggcccaagtagccaaccccagacccacaggagggacccactcagcttcctgttgtctccccacccaatgatcctcctccctattatgtcctccctgctttcctaccctggacattcagtgagcctgactctgtcccaggccctgctctaaaccctgggggggcatagacatgggacagctcccactgcactcactgagaggtggcagaattctccaacagttaccagccaccatcctgcatccgccaggagctcctgctctgccaaatgaccaggctgtgatactagggtggttggactgtagtggaggcaagcccagggatgtggaaacacagggcagggccaaatcaccaactttggggatttaggggaagcttcctggcttggaagaggtggtgtctgagtggggccttgaaggatgagtaggagtttgccactcagacacaagaagaacattttacgctgagggaatgaaacatgaaagtgggggctgaatgcaaagatgctgagtgtgattggagcatagaggagatgacatgatgggaaggggcgagggacaggcagggagcaggtcatgaagggtcctggagaccgtgccatggtagggagcacttcccagaaacatctcagagtgagctgttgggcactcctcccttcaccccaaggcttctgttttgaagggtctagttggacactttcttcacatggtggcagctctgaagctgcaagcacttgagtagccagcatttctgagaagggaggacttcccatattgattgcagcagagcaggtggaggtgatgggtgggcagcagagatccgagcaggatggaggatgaggcagctccctttgggtcctcactccagtggctttcataggaggggcctgagcgtcaggacaattcctggcttggtttgtctggggaagtctttggctaaaataccaggggcagaaatcttggctgggaaagaggaattcacaggactcgaatgatttacctaaaagaaaaagcagaacagggattattttttttggaggtgggactctggcgtgacattttaaaaatgcatgtttccatttctcgtgttctgtgagcatatgttgcttttcaataagaaaaaaccccatgtttgttccccagctatttcaccagtgcctatttatcttgtgccagccttcagagaccctgcgggtagagggatacactagacagggcagccaacaccttcccagagtgcgaccctctctcacagttagtgggcacccacagtggtgggtctaggggcacttcctgtatcacatcactcgtcttgacaatgactcttgaggatgggtataattaacatcaacttccagatgaagaacctgaagctcatagcagttaaatcacttggctgaggtcacacagtaaggtgtagccacgttgggcttccagtccagatgagcttggccccaaagcctgggccatttgatgctgattcttttggtctattggactcctatgcaggctccctctgccaggcctgcccctttgcaccttgggtaccgctggggaagtcatacagcttctctaggcctcggtatccccacctataaactagggataattacatctcccttgcaggctcattatgaggcatagggaagtgtgattaatgcacgttactcaggacagtgcctgacactggatgcctggctaatgaggtcttctaatcatggtgtgggacaatgtgagctggcgttgattccctgcttctatcacaagaaataattcacttctgtctctttccagtttctggcttcagaagatgtaggtcctcggcttccttaagctcctaaactcagactcaggggagggatctgtatggaaaaggcagtggcctccctgtcctggttcccacatcattgtcccctggcttcccatggctgtttcttctcaggcccaggctcaacccagccctggagatagcccagacatgggccttcagcatggaacatcaaccccattcacacgtggtcttaagattagttacaaagaccaaggccagggtgagcctggagcaaccatgtattcaacgctcctactgctgtaagtcttgctgtttgggacctgttttctccaggtgctccacatacatcactcacacccactgcttggaacacagcatgtttgccctgctggttcccttccaagatgacaaccataaactctgcagtctgaaggagaccctctgtttctggagggttaccagaaggttgtgctgcccatccatctcccagaagagcctgtgcctttccttcatttgaagtcagaccatcccctaccttgccgtgtgttctgttccaggtagcattgccttgccacctagctccacttaggtgtggtaccctgggcttgtattgaaggcaggatgttgggagaagcagcccctaagaagctagttattgtgcctattgcaggaggaagagtgttaaggaaattgctgggagacatttttctcacctttagaaccaggaaaaggagggccgattatggagagttcctttttatctgtggaaaccaggctgaatgagactgcgtcttcctctccgctttgtctgctaggaagcacagagcccaatgcatagcccatttctaggaggtgcccaggaccacagcattaacaccatggtgtgtaacctcacccttgtctagtgattgactggagcctgctggtccccaggactgctctttgtgctgtcctttggggtccagctctgcatctgacttggttccccccagccccatcaagtcagctggagagcaggacctccctgggttctggctgcttctctttccagcagacctgtgtcttcctggcatcccaacagccatggttgacttttcacgtttccatgggaacagtctgactgtagccagacaagtaactagagaggctgaggaggagcgtgtgtgagtgtgtgttgtgtctgaggctgctcttggagcccagagatcttgtgtacttcccttcggcttgcagtggctgcagcagcctcctcttggtggtaatcatggcccatttgcacctcctacatctccattgctgacataatattgcaccggggtccatccatctgcataatcatcttaacctgctcccataagagagtttaaaaggtctgggctgttggaaaatgaccataaagcctgaacgcagatacctttagcagcaacgccaacatctatcacagggtaattagaggcaaggagtgagggctcctggctctgtgtcggggaactgtttggggctgcgtctgctctgactgttgaaaagaaagggagggaaagacccaagaaggcagtccaggaaggagaagagcagtttctgcagcaataagaggatttctttttactggagggtgtgcagcttctccaaggggaaggaactttgcctaagactgtttggggactcccgggacctctgttcacacgttgaatgcgccatggttttctgaaactagaaaaatcatgaccaggactgttcctttcttactgtgttctaggtcccaaactctggagtgctgtgtggtcttgaacaagcgcccttttctctctgtgatcccatttttctatttgtaaaatgtggggattggacaaatccgtcagtttccaaactcttatttgtggaacactggggctcactggcagggatggggagagggaagggggtaggcaggggtgagacccacctcctttactccaaccacagtggcttttctttcattggtcctacattcagctttctaaggaaggttatacatgaagagcagttttctgctaccagaagcactggacccccactgggctccaagatcccttagagtctctggtgttcgtatgataaaagtactaggcttggaaaaccagattttgctacgtcctttaacaagtgtcgctttattgtgctgaatttgatctctccagaaaaatagtggcgtctgtgcagacaggcagtgcgacttgagggagtgtgaggaccccacggagtcagacacagaggggcaagaacagctcttgcaaagcagagaccaggggccaactgcccacagccggcctcctcaggcccagtggggctccaagtcttcgggaatgccccaggcagtgggtggctgtcctctctgtgttgaaacaacagagctgttttcttctgggtcccccgccccccttggctgtcagctctgagcagggtgtgcagccccctggctcctatccacatggagcctggtcatctccttctggggtctatcaactgcatgagctgtcagtggaggccacggcggcctctccgttgctgacctcttgttccccagcctcttgaaaactcgctgcaatttgtctctgatcctgctgcagtctccccgccttcccctgaggtcggggcctcaggctctcaagactgtaaggctcactgtctccgctgctgcctcatttgccaggcacttcaagctccaagtctcccctccttcctcacttttaggtctttgaaattttgcgcccctatattcgaaagttatcctggtcattgacagtgcagggagagaaactgctgaaagcattcccccttgtttggagggtccactcctgtcccttctaaactctggagttttccacacctcctcttttctgtcaccttttagatgcctcctgatacctggtgtctcgcttatggtgtgctccctgtgtgaagctcagtgctggtgtctgtgaggctttaaccaaggtatacattgaaaaaaaagaagaagaagaagaaataaaagaaacttttttctgtctgactttctgtgtgtgtcagcccaggcctggggaagtgtgagggcaggctgggtgagtttgccaatcttgtcatcccagaaccccagaaacatcactaccctagtgctccctgcacacccaagccatgctggccagatgtgtcgctctggtctctgttcgactccagcccagcctattctccttggcagcagctcctggcatgctctgcagaaggggcagctatttcaaaccaggctgagggccctggatgtggccatttaaagaaaagatgatggtagctgtcttgccaggcagcaccactgtggtctcacagagcacctggcagcctgcttcagagtacacacattgcctgcaaagagtgctggttttctgttccttctcaaaactttgccttgggacagtggctgggtcggaggctaaggccgtcttggggcatcctttgcccaagtgcagttcttcccactgagccacagtgtaacctctgacagagtctgcccaggctggggctggcgggtcacctatttattttaatagggcaatctcttttgggatgactgtaagcagaggccccaagtgaaagacatttgaaaacaagctgcctggaaacaagcctcttggaggaccacaggggggtggattctggagtcttctcttaacgtgcatccatgcctcccctgcctccattcatgttggcctagtccatggccctcccctcctacttgaggagaacagccttccagactcctggaggcccaggcatgggacgtgccacaggtggacctagaacccaggtctctgagtctcagtccacttctcatcactcctgctgaacccacacgtccctcagcaggtatattaactagaagagccttgttgtggctgtggaggtctggcagttacatggaggcgcaaataaactcttgcaagatactgtggggtgctagaaggagtaacttcctggaaggcaagagacctggttgtggtctcagatctgccaagcggctgtgtgatgttggatgagcagcttgccctttctggccttggcacctgtagttgtacagtgagtggtttgactctgggatgtgtcaaggcctcttcagggtacctctgctctaggtaatgtcaggatctttctcgaggcatgaaggagaagcttgtggtagcagacaagagcacgtggagcaggacgggatgaccctggtgttctcatggaagaaggtccatgacagctccttttccccacgtggcctcgtctcggggccccaaagtgagtgcagtgtggggcctgcctgctgcccctcctggaagccctcgctggggcagtgagcagttccatgctctatatcttcatcccatggttcttcctagggatccacttgtgacaaatgcctccttgatgggaagtgggcaggaaacatctcctgaagtgcagggagccggccctctggatgtagcaaagtcccacctattcatgtgggcaccaacctgggcaggtatgaagtgacagagaggaggaagcttagcacctgctgtcagggcgtgtagactggcagggtaggcagcagtactgctgctgaggtcatgaatcttagtcctctcactcagctggtgacacaaatcacttgtcccacagctgcttccacgatccattctgtggggctggtggaaacccatcacctcggctcctctggggttgtcctcctgcctctcagattccttctctgggcatggctcatcccaggagtcagagagagggtcctctgggtgtcacccctcaggcccctgggccctcactctccctgcctgtaaggccccttcagggcacagcctgctctctgctgccttccagccctgactaaggcacaaggctcctttctgtggctgtccccagccctggcccccagaggtctccccaggagcctttgctgtgggctcttgctcagcaggagcagagaaggcagggtccctctctcgaggaatagctttcactactctcctccctccagcttggggaaatctccttttggtttgggagcaatacttccacatttacgtttcttccaagatcccctgcttcttgctaagaccctggctctcctgctttctttctccacaaagcctccacatcttctaacagatttacaccactggaaacaaaagccaggacatctcatgggtgccttctgctttcccctgtgtagccggcatcttgtgaaacaagggtgcacagagagaacggacaggaaagggagagcagaaaactcaggaaagaacaggccctctgagctgggattttaaagtagtatctgggcaccatcccggatactacgttcccatgtagaagcacatgtgaacatgagcgcctgcccctaggctagtgactaaggtccccatgaaagaaggagagctcagatacagactggattctgcagtgctgcccaggccccaggatgtggacaggataggacaggtccttggctgtataactgggagccaaccatgatatgaagccacacttgggtcacgcaggatgtccacagaagcctcagtcttgaggtggtatgcagagagagcgtagccagatcctgtgcatcaggagggaagtagaaacctagcctgagattcagaagagaggagaagaggtggagcctgggagtggccccagatggggtatggttttgcaggtcaggcttaggagttcaagcccggtccttaggccacagggagccatgggtggtttttgaacagggatgtgagtggtgagagacaggaaaggtcctgagtgagtttgaagagaaaggtggaatggataatcactgagctgggagttctttggaaggcttcctgaaggactcattcattcattcattcattcactcaacaaaggcttctctagcaccttccatgtgccagacactgctcatggtgatgaatataatagagtgtctttcctatagcacttacattgtgggtaggggagatgggcaaaccttaaccaacatataaacattttttccaggtggtgatgtagactcagaagatatcattgcagggtaaggagactgagagtgagaggggatgctcttccagctagggaagccaggggaagcttctagaggaggtggcattggagtagagacctgaagagaatgtgggggttgattttgtcctaaagaacacgttggctttgcgcagctatgatggacagggagtgtgagtgaagcctttggggaagagttcacaggagctgcaacctgccagtcttgttgctgcagagactctgtgggggtgagctttgggtggtgaggttggaagggagacagtgccatttgggatgagagttctaaggctgggttgaggacttcagtcttgctcggtgagcctcagaaagttgctgtgcaggaggtgagcaatggaatgaaaagcgcttgggtctctgcagaaggctcccttccaaaattacagtgggttggccagggcagggatccaggagcagactgagcatgcccagagagccccctcctttgcaattactacaagtcccagcacagggcagggccagatcccttggggatcttctccacatcaaaggggagattagctccaagcccctaacgatgctggatgtgctggccacactcaccagtgctgcctcctctgagactgtcagctttatatctgcttctttttatcaatacgggcaaataattctctagacatttatcattttaaactgtcacagtccagtgcctttcccgaggaccacaatcaatactgatctcggtttgaatacttttctgacaaggttcctatttgtagattcacaagtagaactaatgtgtgttaaagctattcagtttggcattttgcagctccattgacacattaaatataggcgttcaccacgacgattaaccttacaactattaagtaataaaaatcccacatacatatttattagctgaacatcctattccggcatgatgccttccccgacgaggtctttccatgatgggaaaccagagaaggtggaggtgctgctggagagatgagctcactctttgcagagaatgtcaggagggatgtgggatctccaggccacagtgttggtgggaggaggggaagctgctctggggatggaggcccggatggaactagagttgacggggtactgaggtgggtagcagcagagctgagatgttctaggatggtggatccagctgctctctggggtgagatcccagacttcctcattcctggtgcttctgaataggtatcctttctcttcttgggcctcagtttcctcatctgcataatggggtcagactagaattggtgcctcctgggatttttataaggtcatggcatgcgtacagtaggataaaatttgtaaagcctacagcatcaacagacaaggagtgaccagcttaggagaccctgggtgccccaaagccccctctggtgatcatgagggttaaggcgattgacagctcagtgagtggggcacaccagcggggactatcaagtagatgagctcagatgtcccttttgcagtggatgcttggtgactctgtctccctgcttattgatgtggaactctgcttcctggatctgtcttttctgggccagcatccatagggaccctgagtacctatttcctggcacaggggtgcatgggccccagtatcctgggtgtcagctgaggcagcgacagggtggacatctgctcatgtctactgccattctgaccagttggtgcccaggcccttcccatgactaataatatgagctggggggcttcataatgggacaggcgcggggttctagaatcagcactcccaaatccagacacccttgccagccttgggggcatctatccacctttaccattggtccatattcgtgagctctggctcagtcccaggcccaaggccagctggggttggggagtgggtaagtgacagcaggacacactgtgtagtggcggaaaggaggagtctccacacagttgcagcacatggcagaaaagggggcagagatcagagagggcttcctggaggaaggagcctctgcttctagactcactggacaagccaggattcttcaggcaaagagtggagaagagtattgtcggcaggagcatggcacatgagaggggatgctgcagtgcctgtgaggggtgccctgaagactgcactgtgggagcacagccccatgagagctccagctgccgtgctctgatgtcactgctgtgtctatgctcccagccagcgactgagtatgcaggcgtgttccaggagacaagggccgtgccctgacccctagatgtggccttgccaaaccttcatgagactgcatagcatcttttcttcactcatggtcagacctgctctgggatctggcggcagctctcccagcctttcctcaccccctctccattttctcgcacacggacgtttccctaataaattcctcgcacgttgcatcccatatgggtgtctgcttcttgcaggacccaaactaacacaagcaggaagtgcttcaggaactgaagggggttcattctggcctctgggtaaagtgtgagggtgaaattgtgattttccattttacaacaagggaacaaagtgcctgcaaagttctagatgcaaaatactttttaaactgcaacatgacttgtgaagataggccctgttgatggctgtggaagaggttaggtgctggagcaacacttcctggaaacctgaatgcacatttgccatctcataaaatccccccaatggagaaagggaagtgcacttgtctccatgaacgccggaggagagaggggctcagatatgcaccatctttggcgcatcaactttgggtctgggataggaacccaggtgtgtctaacagcaaagtgtgtcccaatcttctgaggtgtctagacactgttcatgtgccaagggacaatcaaaacctgtcacctcggctacagttggcaggaggatacttccacccacactccagttgaaaccgcagaaaatgctgttaggctggctggcctgggatgtgaagctgtatagagaaaaggcaactctccatttttaatttatttacaatttatttttatttatttattttttttagggacagggctttgctctgtctcccaggctggagtgcaggggtgccatcatagctcactgcagctttgacctcctggactaagctatcctcctgcctcggcctcctgagtgggaaggactacaggtatgcaccaccctgcccaccatgcccaccatgcccagctaattttttatcctttttttttttttttttttttagagatggggtcttgctatgtttcccaggctggtcttggactcctggcctcaagcaatcctcctgcctcagccttccaaagtgctgggattaccggcgtgagccaccgtgctgggccatgactctctagagtgggccacagaacccctacacagctgagagatgtgtggacaacttttgcagcactgtggttttgctcaagaccgctgtcccttggcctcttgctgcactcccagagtcagaaggttggggcacactggctttctcctgacctcaaatgaaaggcaaggaggcctgggattgaggctggctcttttaccaccgtgagacccgatctctgggacctgtcattggagggcagctagcgaccgtggggcaatggggagcagctgaccttgcagcgggaagggccatgcctctactttctaagacagagggacacaaggggcgaggtgcctctcctgggaggtgaaggctggtatggttcagtgccggggctggggcagggaagcctggagcactcagacctgcttctgggggtgtcccctgaagatggtgagctggattagccactgtcagtgaggtgcttctggtttttctctgtttctattttctatcttgacagaaaaattgtgattttcacactgtcactaaaccaataggtccctgacatgtgtttttgtaatctgtggagctggtttcctgtacttctgacagttctattacatctctgacagttatataaaatttttcctctgggaagttgatgggggcttttgcctctcccctcactgtaactccccagtcccccatgctaacttatgtttggagatgatggagcaggatgaatgcttttctcgttcctgccagtcacctcctgggaggtggacggtagagtgcacagccaacagacaagggagggagacccgaacctgagctccctcaggtgggaaaggggagcaggacagatccagccctggtgactcaggaacccacagtggaaggacgcttcattcctgctgggttccaaattcggctgattccctctgagagtcctgcccccaccccttgcaaaccacagggcactgtactgagggaggagtgccaccctgcttcatactgatgcctggaaatatatgggggcaggaggttggggcagagccttggctgcagtgtgtgcatgcttgtgagtgtgcacacgtgtgtgttgaattcagggtgtcacatctgtgcacatccacccttgccagacactgtgccaggccctggggtgatggggctatagcctctgtacctggggggcccaggtgtgggtatgaatgctagagctgcacccatgggtggagcacctactctgggtaagtctgtccctgtgctcacactggaagcacatgcatccatgggcatgcatgagtgcgtggtgcatatgggggtagatgtggggaacatgtttgcttctgactcggttgctactgtctggtgctaagcacaatgtctgtcttcgagacaactacttctttagcagaaacagtgatagaagggggcgctggagggacgggagcaggggccaacatcacctcagccacaggcattgcctgtccatgaagtgggagctttgtcaccctggtcctgtcactgcccttctgtgtggcattggacagatcccattgactcagccaaattaggaggaggcactgaacattatcttgggtattctctatgaagcacatataaagtggcccctagacccccaaatagcacctcagcctctgcgaatgcctttgccagatctcagcctggtcttgagacattatttggggcctttcaatcgacttagccactctgattttcctgtctatggaaaacgaggcgttgccatggcaactgccacattacacggttctgtactgacgatgcctctgagatacagagcagcttctcaaagagatacacttttcaacatgtcatgtagaattctgtacttgttagggaaaatcgcatttccagcaaaatgacatgtctctcccgggcttgcggacgcatggctcacgccttccttaaacaaagaattttattcactgcctccctcctgcctctctggtctgctacttgctacccacccctcccgagccccaattccctttacataaaacatgaagctggagatgagggctgcgcagagggcagggctccactagccagggtggaggtgcccagagtgggctgtcccttacagcggaggggcccagaggccaggtctgggggtgggtgccttggctctggctgtggggtcagctagctggcctggttctcctatgtccctccactggcttccaggaccctggcctgacttctcggggacatgcttagaggaaggattgcaagctccccagccccactccttggtcagcgctgcaaagggcctaagtgaggagctgttgtcctcttcaaggtcatggcctccacatatctcgtgtgttcagcagaaccatgtcagctgctctgtccctgtcaggcagtgtgttggggataaagccagcctcactggacccacttggtgtgacactggacccactactttcccttcttgacctcagatctgccatctgcccctgagcaggtgggctggatgcccctggcagagcctgctctgagagtctgagagcctgtccccatgctcccacagatctccagaccccagctctccttgtggttctacctagagagtctgaagctctctttctctcagattctgtgactgataaattggccactgagatatcccaggaaagtctgtgtggacacagggatgagcttcccctaagggaactggctgcctgtacttctgagctcaaaccagaaggctcctatcctgggagcccactcctgcatgttggcctttgccggagggatgttggaccaagctgctgagtgaccaggccaacacctccaagcactgatgcattcagattacttgatgaattgatgcaacatgcatgtgttgagggtcagcactaaatgagttaatacatgtgaagttgtttgatgagtgctcggcacatacgagccatggtgctcattggccacagtggcatgagaagggtgtggagacgtggaaacacttgcacagccactgcctccaaggagcttggagagaggggacagcccagcatcgaacagtctcagcacaggtggggtgggagtgctcaatgtagcctggtcctcgaggctggggaacccctgagggtctccagcccttttcgctgggctgaggggagctcttgctttcaggagaactgcctgaggccccttcattctttcctattagaatggcctcagaactaagactccccccaggagttaatcccacagtttacattggcctctctccagggagtgagtttgaggaccattttctccctctgccttccctaaggcaatcacattgttcctggaaaagcttggctatggagggctttgtaggcccctggggctccctgtgggtggtgaggaaccctcaggtcagcctcctttcacaggctggttatctgggaatttggctcttagacaagttgatcagcagttgtccttctgccaagggcaacagggaacctctggaggggtgcagtgggttggttcagggcactagagagagtaaggaatagcaaggcctgtgtcagatacagaggagcagctttacacgaggaattcagttttctttccttgagactagtgatgttccaagtgtggttcacaggtctgtgttgctggttcacaaattgttagtggtgcacgaaggagtaaggaggttgcatcagagcataaagcaaatacaacattaaacacatatttaattcagcttatatatgcacacaaacacgcatgcccataatttgtatcacaagacactcttgatgaaggcagcaatgcatcgattcaggttctagtgcaagctttgaatgccattgcagacaagctctctgagtaacactgctctccaccacctctcacctgtctcccagtggagatgggatctgcctctgtgctgcccaggccaacattccctctctagtggcctccaggagcttcccactgggtctccctgcctccaatcttaccatcttccagcccaaagcatcctccaccctgctaccagaatgtgctttctatgcaaccctggccatgttgctttcctgccaaacaccttccagtgggtctccgagtccaagttccttagggcggtgttacgtaagggccctgtgaatcttgctctcttaatgccttcccacctcatcgcccacccaccttgctttgtcatctagtcacaggatttctttcagttctccaaatatatggcactttgtcttactcctaggcctgtgtgcaaactgttgctcctgggacactgctctcccttcttttgtcctggctaactcctatcccttcttcatcagagacattatctttctgaattaattaggatggcctcaattgtatgaaagagactgtttattttctcaaatatccttctttcttatctatggaatccccccttttggttaggttgatggctgcccaggacaaatgtagctcccagcctcccttaccgccagatgtggtcatgtcgctaaattctagtcaatgggatatagacagaagagtttctgggaggtgttcttaaaagaagagggggatatttcttccacctctcctcctccctgctatctggaaagcaaatgtgatgcctggagcctgggcagccctctttgagccatgtgagtggaagtcacatgctaagaatggcagggcagtgagacaaaagatgcttggttctctgatgactttaaagctgcccctgtcactctgagctgcttatcttcagacttcttatacatgaaagagaaatgagcctctatcttgcaaaagctactgttattttggggctttctattaatcacagtcaaatctaattctaattgatgcaggtgcaagtaattgaatacctgaaagtaaggaagacattttagatctctcttttaacaagacatctggagggggcctgttccagaatggttcgacagtctgatcagtgtctatggttctttcagccttttttctcgtggtcacaggatggcctctgcagctgcaaatatcacatcctcacatggaaacatctcaggtagaaggatgagcataggttggaaaagatgaaagatgttccttctcacacccctgtcctttaaccttggaggaaaactctctccgaaagctccaagcatgcttcccactgcatcttcttggccagaaccatagctgcaagggaggcagggacagttagtttctgggtgagacaggcaaagaccagggttgggagtggctggtggctggaaagtcagtgatgccttgacattttccctctgtgtagtgtctgttcattggcctctctctagagcaggagttccctaagcacagcagctggcaccaggtgctcttaagagtgcatcctttggagcctgactgcctgagttcaaatcccagctatgctgcttgtggctgagttaacgtttctgcacttcatcatttaaaggggagaggcaagcattctcacctacctcagaaggttgtttgaggagtaagcgggttcatatatgtgaagcacagaatgccagttctcaaaattggctgcaggctaaaatcatatggggagtttgaaaacttaatggtgcctggctcctgaactttaccctggactttctcaggctggttacctgggaatttggtgctcttggtcaagttgaccagcagctgtctctctaccaagggccacagggaacctctagaaaggggggtgcagtgggttggtcctgggcactggagaaagtaaaaaatagcaaggcttctgtcagatacagacagtggaatctaactggtctggggtgtggcttgggctttgggatttttaaaagcttgctagatggctgccatgtgcagccaagaacagtggctagcagagaggaagcatccagtaaaggttagctctgattggtttagttcatcattgtggccccagtcatgagcccaaagcctggcacagagtgggccttcaatagctgtttgttgaaagaatgaatgaaacgttggggacaggaagagggagttgaggttgtttagtccgaccctctggcactgggattgctaccctgcccacttggttgttgccttggttggaacatctcctgtgggctccagtgctgcctgtttcctccttctcccaacaggcccccaaaggctctgcgcagaccagcactgtctcctccttcatccacagagaggatgaaagaacatggcaagaggaagactcacagaaccccacagagaagctttgagaattgggctgtctggctctcccatcacccatttggccaccagctttggtcccagctgctgtgccctcgggggatgcattatggccctgaaaggggcccttgtccctttttggggtgtcatcctggctgggtggtatggatttctgctgtaaacatggcccatctgggagaagcccaggtgccacgttttgaacagctctgaaacttaaagctcagaaggctttgaaatgcaaatattttgaaggaaacataaggtaaacatgagtgcttatttccccctgatgaaaacaatatgctgtttgctctgaaatgtaaataggacctagatcgcttttaaagaaagccatgtctcatatttttaggtccagggtaatatcgttcctaagaatatgtgcatccggcagccttcccacctgcctgaatccacactccctttttcattcctgatgcccctcattccagccattgctatcttctcccataaatattccaaatccacctccccccttcccaatccggaatgccacactcccccgccacaaccgtcatctaatttttccagtactctctgagtgcttgggagttccttttggatagaattggggaaaaaaaaaaatctgtagccaaaggcgtttcactgacttgaaagagattttatggtgcattgagttctaatcaactttaataagtatttaatgcaggatggagactttgccctcagccccgaggcccagccatgcgtgctcgcggccccctgttggccatgagagtaaggaccgctgctgggaccggtgttttgggtgggcgcggcgagtgacagctgcagagaaacgaataattagcgattgcaacccctgataatgagtagctccatgatccttcttggagccattaggaacatctatcttattaatgatcccgctcgacagccacgggcccgggtgcccgctcctctctcgctcctcatctgtgcacagaaaagcggagatggaaggtggtcatttttcatctcccttagtagtgggggctcgagctttctaggccggccacatccctagggctgattgggatccacccatgccccatgtaccattcaccctgggcactcctcctgtcgccagcagagaacacctttcatatgtgcccacctggtgcctcttgggccaggggtgccatcacccacagtatgctctcttccctccctgccatttgcctgggatttgctatgatcaccatatttgggcaggtacccgctaagggttcagggccttatccaggttcacacaggtagtaagggccagcgccaggataggatgcttgtcttttttgtgggttttcctgatgctccatgttggcctactaagtgaattcaagaaatagcagcccttcctggctggttttcttaaaggcgatgtccaagccagcagttgcagactgtctaccagctgcatctggtttgtaggtatgaatctgtttgacctgcacatgtcttaataattgggaaatagccacttaaatttccagatttactgagaaattggaagacttggacacattaaatttgtagttctgtatggctagatctcagggggcacctgctcttttaagacagtttgccacaggtcccaccactccctatcatcccatgccttgcctgactgactcacttatgttacctgtctgttcccatatctgtctgtgtttgagcttgctgtgtttgagatgagaaagtcaaggtagataggtcacgtgactcgcctatgctagtaagtggcagaattcggttttaaacttagttttcttggctgtagcttcagggcagtttttcatatagccagataattcagttatcagatactgaatggacggcgatgctgaaaggagggtgaattttgcaagtgacctagaaatcttttctctgattcaacttctggactataatagatgactatgtcatgaacgagtacctgcccactttaactggcatatccccctcctcctaaacatcctccttcctctagaagtttctgttcttgctccctcccttagacccctgcagattctgccatgtttttagaggaccctacttctctagtctcacttgattggcctggacgtggatatgtgaccaaagttgagccaatttcaatgctttttcccatctggccagggatagttggttcagggctgagcattgcatccaagttgtgtgaactatttagacctgtgatgttcaaatcttattttatcagcagatgccttttcttaaacaaatgagatgggcaatagaaaacatctaccaggaataacatggttaaggttggcatggacttggaatcccactcacttggatcccacattctaccccagtagttcttcaaagtttgtgggaactctagggccccacagaacacagtttgcaaatggttttccttgagaacaaataagtggcaagatcccagccacccactgaacacgccagcagatgccttgctgaaaccatcaccttggagacaagatgggcagagcttgagaagcccttagcgactgttcatttttatagggtgaaagcaagccttagaatgaatatctgaatcagtgcttcaacctagagtttgaatctccttgtttttcctaaattttttttctggaagaaccttcacccctctgtcccagcctcacaccagtactctatctcccatcctgaaattgcaagcttttagggaaatgaagaatgactccactcactaagcaaacagaacttgttacttaacaagtggtaagtagtttaaacattgcttttatgtgaaatgtatacacataaaacagaagagaatgcaacattcacctgaggcttcaaaataaaacatgaagcttgaaagggatttgggggttataatgctgctttggataaaatcttctggtgctcttgaacagggccctcaaaatttctctgtaaaaggcaagatagtaaatagtttaggccatacagtctctgctgcaatcactcaactctgcttttgtaattagaaacagccttagataacatgtaaaggaatgggtgtggctgtgttccaataaaactttatttagaaaaacaggtggtgtgctgggtttggctgtagttgctggtccctgctctaggtcaatgtgggtaccctactttgtttttataggtttcttagtagacacatctgagagcagtatatgacactaactaggtatcctacaattcattcaattctgacacaaacttcctaaggcagaccccgcaagttaagggctcagcctccatttcatatgcacttctgtctggccaactacaaattcccaggttcccctatccccaatccaggcttgaatatttgccagaatgactcacagaactcaggaaagtgctatccttatgactgttgttttattataaatgatacaaatgaacagattcaccaggcaggtcttgggggtgaggggcccgtgaagcctaagatactgactatcttgccctttacagaaaaagtttgatgatcctgagcagtgcatcaggaaatgttctccaaagccacattataccccccagatacccctgaagttcaactgttttattttcaagccttaggaaaatattgcattctcttctattttatgtatatacattttacaaacagagtgttgcagagcttccatgctctctcccagtggaatgtgggtatggcactcttccagcagtgtggaagttacccaaatcttgtttcagagtttctatctggggtttcattagtaggcgtgattgatgaaatcattggccatgagattgaattcaatttccagctgcaccctctctccccaggggttggtgggggtggtgaaagttctagctctctaatcacatgcttggtgtatctggtgtggccagcccctctcttgaaactatctaagggcccaccttgaatcacctcataaagttaggtataaccaaaaggtgcccattatgaataacaaaagacactcctatcactcaagaaattctatgggtttttgaagctcaaaaaccaaatatgtattttgtattataccacaattggcaaatggattttacttaatttcccaactccaactgattggtcatgcctgcttggagtgctaggctgtagtttctgaggctgggtccaggttcactggaaagagtgctgtaatcaattagtgatgtctgccatgggtaatacaggaggctttagcagcacgtgtgccgtttatctgccattcctaaagggaaatctctgtatctggcacctgttttccaaacagtattttcttatcttcccaaattttgcctgctaacctgtatttatgctatctagcctctcaaagaggctatactgaggtcagatcctactatcttcccgacttgattttaagtttcaggagagcaggtttcctggtgaccatgcatgaaaactccagtaaggaatatagccagcatcactctgtgtacagagttaaggctgcaagaggggaggggaaaagaagtcagtgagagtgtatagaggtcagcttccctgagaggtagagggctgatcaaggtcccgaagaatgggcaggatggggtaggtggaggggagaggagggtatatgtcaggaagtgaggtgttgaggagctgtgggagaaagagctgagggccaagtcttgtccccgacttcagagggcttgagatccaggtagagttggtagctgtgggagcccttgttgttgctggacaggagagctacatgggactattttgacatgggggaagatgcatggaagggcatttctggccaagcgtagaagaacatgagcaggaggaagtgctcctgtttggagcagcctggccactgcagggaaaagaacctctccaggtgcacgcattggcccattgtgtaggagaagccagatcatgcttaccttccattcccatgcaccaagcaatcatccccagaagtggggtcctctaaaaacttggctgcatctgccagagtctagtggtgggatcaaggagaagagaaacctatagaggagaagggaaacctagaggagcgtgtgccagatgaaatgagcagacattttctagatatccttgttgggctgacacacatggctgtgaggaacgaaactgtgcagtaggagctttgtgatccgcttggctgacctggagctgatgtttggattaaggtctttcaccaactctgatgaagcacctgccaacatggtgctggtgatgttcacttgcacagcccatgtaaacctttgaggagcaggtactgcgcccatttaacagatgagaaagtcaaggtagataggtcacgtgacttgcctatgctagtaagtggcagaattcagttttaaacttaattttcttgactctagcttcagggcagtttttcatatagccagataattcagttatcagatactgaatggatggcgatgctgaaaggagggtgaattttgcaagtgacctagaaatcttttctctgattcatcatctgggctataatagacgaccatgtcatgaacgagtacctgcccactttaactgggatatcccccttctcctaaacatcctccttcctctagaagtttctgttcttgctcccccgcttagacccctgcagattctgccatgtttttagaggaccctacttctctagcctcacttgattgtcctggacgtggatatgtgaccaaagttgagccaatttcaatgctttttcccatctggccagggatagttggttcagggctgagcattgcatccaagctgggcctatcccaggcaaatctttggcctgaaatttttcaagacggagctgaaagggagtctccagactctccccacaatgcaggctgtagggtgtcaaagccaggagcacccggcctctgtgttgcatgccatgctgaggagctggcctgcaggtgagagggaatgaagcccctgcagagaggatcagagatgagagatggagggaggaggttctgttctaattctggttcctgtttctctgaggcccagctgctttctgcctttcctcagttggatcattgagcctccttttggattctgtgagtgaatacattccccttttggcctcatctagttcgagctggatttctgtcactggcaacatgagttctgactgacacatagcccgtgtggaagcatctgccattcatatgcgcatgagatatttacagggctggtcctgcatacatggcactgtgcacagctgcaagggcactgggcaggggagcacggagaagtggagaagcgggttctgttcagagatttggggtgcagacaggatccatctgcaggggacaaatttgtacaggctgatcatagactctcaaggatataaagggacatccctgacacccagatgtcacctagcctggggttggacccatgacccccaaagcagattctaacatgttatgtcttcaccttgaaggaggaacatgaatatctccagatctcagagaggatgtctgacccttgagccagaagaaggcccatttactctgtgttcactgattaatcctgaatgccaaatgtggtgcctgatacacaggaggtacttcataatcataatgtgagctgaatgaatgaatgaatgaatgcataaattaatgcatgctcagctccgctgagctcactcctcttccaaagcagtggaggaggatgcagcctctgtcttagacatgtcctagcaattctggcttccttccagagccttccaatcctccctgtcccctgttcacctgcactgcctccctgaaaggagagttatatagaaagagggtcaaagccccaaagcccgaggtcaatcccattcctgcactaagccaagtcctgcctaccactcacaccacgtctggtggtgtcctgctcttccctgctgtctctctgtctcctgcatgaatgcacccctactccctgcacagatgtgtatgcaaaacccatcctgtcttggcattcactgtcttaaaggcactcagtaaatgtttgctgaatgaatgtggaatgaattagattaaacagatacacttgctctagcctccgtgagatggtttgctgtttaagagctcagcaactcacaggggagatgtcacctcagggatcgggatgaagaatggaccaaagtgctggaatagatggaggttcagggcactatgggtgggcacctgagggagggactcacagaggggtggcatttgcactgggctcagagggaatgagtaggagtatagctggtcaagagtatacctggtaggagtgtatctgccaggatatgttatgaattacagtgataggaaaagaaaatctcaaacagaggtagggtagacttcagggctggctgattcagcagctctcagatgctacctgggactcaggttctttctctctctactctgtcatccacggtgttgattgcattctatagtcaaacaatggctgtcagcaacattgggggcaatgtgtgtcctagtccttgtctagtgggagagaggggaatcactcttccaagcgtaaattataattggattggtcaattttggaaaagaacctgcccctggacaaataagtcacatgggagttccctgtgttgattgacttagaataatagggcccacccctgggaaggatgaaatcaactgcccttgagccactgggttgtgtggggaatagcaggtgggggataccagaacaaaacagaggccagacaggaggcagggaggatgggtagcaatgaagagagtccacattggagtaggggaagatgcacggaagggcattgctggctgagggaacaggccatgttaagggttagtgtcaggacttctgtgtttgggagataataggagccaagtggagaaggggctgagaggcagatgcccaagggcagggcttgaatgccatgctgggaaatgggatctccctaggagagtggacttccgtggacaggagaaggggaatgagaaaaatgctgagcaagcccaatccctccctccttgggttcttgtggcggtaccatcccaggattaccatctgaagtagactgggttctgcaggtttagacaaggcttgggtctacatttccccacgtccccttctctttggggttctgagttagggctggccacatgtggagctgtgggagatttggaaggtggaagcagagaagaattaatcattctcagaaggtcatggccatcagacagggtgacagatgcagaagtgcccacgggcgtccagggtcccattcatctttccaactcttggccttgcccacctcaccagtgggggggccccgagctagccaccaagtgctggactgcaggtcccccagaggcagcagcctccatagcccccgcttccttcctacctgcccccctgttcccgtgcttcaggctgttggtgccttcctctggtcctctcccagaccttgactgcccagcccacccgcatctgtgtaagcataaaaaactcaaatgctatgttaagactagttgtcttaacacctacacattcactggagtcatcctcgagtcataatagctcagcttgacccgatcagagaggctgaactatagcataacagcacagactgctggcttcagatcctggctccccacctacctgctgtgcaaacttaggtgagttttccatgtctctgtggctcagcttcctcctctgagaagtgagcctaagaatagaactagctgcagagagtggctagaggagcccatgagttgacaaggcagcacgattcgcacagtgcctggaacatagtaggtgctgtgtaagtgatagctgttgttaccacctatttgtcgtgttccaggcagcagcccaggtgttcacacaggtgttaattcatttaatctccccaacaatcctgtgagagtggtagtgctattaaccccatttacagagtcacagagaggctattaggttggaacatatgaaattgctagttttgtaggtcaaacatagttctgtatcagcaattgcatgtggctcacagctagcatgactgcaggtctcaaagccgggcaacctgcccaaggctatgcagcctgcacttttactggagcacctactgggcaccacagagacggtgtgtcctctgttacagaacttataatattacaggagggctgtttatgtaacaaaggctgtgcacatggaacagggaactacagactattttcaatacctttcctctacaccttcgctcatttgggcatatcagacatagacatcacctcttccatgaagccttccctaacttcccccaccagagaagtcaaccccggcacagagtcagaggtaggagagggccctgtttatctgggggacagtgggaagttttgtgtggctggaatgtccactacttgaagaagagcctggaaagggacccaagccagaggaaaagacttcggatgacaatggggtttggctccattgtcaccatgagaaggagccatccaggccaactcttcttactcatgaaatgccactgaatctcttgatcttcgcctgcccttaggcctccttggaaggtgctccttggtgagggtgcacccgggaacctgaaatgacctgtctggaaagaggtgggcaagtttccaagcctgggcggcatcacagggacttcctggcttttgcctgaggctgcagtccctgtaagagtgacccattgagttggcctctgccctgggagtttcaggcggccccacgtcccaccttctgctttgcatcctctggatctaacctgccttcccaaatccaggcccgtggctttgttctgggaagcaccatctcagcccaggctcagtgctgcccatcccatccccatgtctgtcctgtactcctctctcagggtcagggctattctcctcttatctggggtgagggaatctgacagaatgtaccagaagccaggtctccctgagggctttcccaggactgccagggagaactgggggtgaccagggtctcctattcccctgcatgtgttaagaactttgggtgtggtgctgggctccctggtaggaatcctggtctggccgttcctaaccagtttctcctttgcaaaatggggcttacagatagcacttacttccgaggccagtcagtgtttagcaactggtcttggagtatagttccaacctgaaaattgattggtatttttctgtacctcaatgattgaggtgaacgtgaaacaatgaagatgtaggtacagacttgacactcacttgtcaaaagcatgagtgactttgctgaattggataatagattttgaatacagaaaaaaatattttgtcgggggggctactcacaaactaacagctatagaccgacacaggcacacttttaagtttcatttggaaaattaatattttctccatcacttttttaagtctagaaaaatcaataaaaaataagtcaagcctttgtcaattttcatagtgacgtcactaaacatggaattggaagagaggcttagtaggcttagtagccaccatgatatggcatttccactgcagaaatacaacagaagcacacggccctggcagcatagagaacaataaagtgcagtgagataattcggaagtgatgagttttgaggatttcttacttttgtttttagtataatttatttttaacttatgtaatttaattttaaaataatagtcatatttatcacccagcttgtaaaattcttgaaaatttaacaattggctcttgtgagccggtacaagctggctccagcatgccaccccagggttattacagggggcaaataattgaatgttttcaaaatgttcagaaaacactggcatattgagtaagccctccataaaatgttagccaatcttcttacttactattatgattctcgattggaactttggtgaagtcaggggctgaggttaggtgtgttttcccactagactaagttccacttgaggacagggatctccttttgttctcctggcatctagcataggcctggcctgcaggaggtggtgggcaatgctctctgagttggcatttttcctgcttgacctggatggacgtccgtttcactctcgctcacctgtggccatttctgggtccttcccggcatcacaagccacagatgccatcaggtgggcctgttggtctttcccttttcctgttgccttgtcaggaaaatctcacaagaaggtgcatatgtgggaagcccacttctcaggttctgacccaggagaggaatcgaaggcagatattgtcggctccatgcctgcttcctgctctttaaagagacctgggggtgtttacaagtttaaagcctcacaacattgggattgaagtagcattgcccctttgtatccacggggtctgcatctatggacttaatgaactgtggatccaaaatactcaggaaaaaaaaaatccacaaagttccaaaagcaaaacttgaatttgctgtgctctgagtcctacgctgaatccacacgaatgaagtgatgtgcagacattgtattagctattatagtataagtaattagagatgacaaagtataaggaaggatgtgcataggttatatgcaaatactatcccattttaaaccagggacttgagcatccctggattttggtatccatgatgggtcctggaaccaatccttagtggatacccaggaatgactgtgcttgcaagaggtggctgagttcccatctccctgctgaaactaatggatgtgccaaccctatgcaggggaaacatgtacttaaggacccaaatcttactggaggagggacttgtgaggagggaggatcagagaagtttgctcagagtctgataaaagtagcgtgaatgctttttcctttatccacaaacatttattgagcatggatcatgcgccaggatagggctggcttctggggatatgaagtaaaaattccacagccttttctctcagggagattacattacagtaaaaggaagcaaagagcctattggaagggctgtcactggacacagtatggaatccccctcagcaagttgcagctgctcaggtgggggcggttggtcctagggaagcattgggaaaggctcagtagaggggtgatgcgtggtttgcttgttgcaaggtggggaggtgctcacctgatgattaagggacagaggccatggtgctgtgggcaggaagtccctcatggacgggcaaggccatgtggcagggacttatgtgacccaagcaagtgagaggaagggcacagggcagggcttagcagaggagccaggaagcagcaacagagaaggggttcacccttaaaggagcagtccataaagagatggcaatgaataggtcagaaggtgaaggaagacaatgagacaatgataggtaccccagagtagagcctagagcctgcacaaagacaggtgcaggcagcttatttgtcaggtgatcgtgaaagctggagtgagggagcagggagagagagagagagtgagaacaggggaataaagactgcataattactgtgggcaactgatcacaagcccagtaggaccctctaaggaactgtggagaagatgccttggaactctccctcccaaggatgggaagttgactcactggctcccatcttccattggttgggagttgcccctgggggtgttaactcttccatgttttggccatgcttgtgtttgagccaaggggtcaccctgaggcagaaagggagagagtcatatcagcacacttgaagtgaaatgttggcagcaggtatatagctgtctttctcagctgtgctgatgtcagcaggaccaaaaagatgtgacatggagcacacaaagtatttgctaaaggaatcaaggaaagagtgagtttcaaggagaatgggttggcaggttgcctgtcatggagaagtcttggatggaaaggtccaggatggaaagagttgggtttgcattggggctcagcagagaggcagggacagagccaagttgcactgggctgaggaatgagagggcagtgaagaagcagagacaatggcataagtgattttttttctggattgtcagctgtgaaggaaagacaaggaatctggcaatagccgatggtagatacagaataaggaactcactgaggatgaagaatgtgcaaggatcaaggataatggtgaactttagggacttcagggtttgcatttcaagttttctttccttcagattgtgtatgtgtgtgtgtgtgcgtgcgtgtgtgcgtgtgtttgtgtgggtgtgtctgtatgtctgtgtgctggactaaagagagagaaggaaaagttgctcttttcttgggactgtgggatgacatgggcattgaggttggacagatttgatttagaatctttggttctgccatagtgtgatctgggcgacatacttggaactcagtgttgttatctctaaaatggggataacaatatttctctcccagggtacttctgggcttgaataaggaaaggtttgtagaagagtctgacacagattagatagtcagagcctcagcattgtcttgagagacagtgtggtggttaagagaacagatttttgaaccagactgcctgcctgggttcaggccccagctctatgctgtccaggctgtaatgcacacagcgacagcattggcaagagtaggggtgtgatgagatgtgaggctggattggtaaacacgtccagagagctgagaccagagcccaggccaagactggacttcatctaccctgagctctagggccctggccactgtgctactcccagtgacttagtttttcctctgccaggagagggtgaactgacacacacctgtcaaatgtgcggctcagataccagcactccctatctctagcagacattatcgatggaacagacactttctggtggagtttggacattgtctcattcagagtgcttcttgacatgggctacacgtgggccctgcaattgatcagacttgccacatgagattttccatctaggtctaggtgaactctctagatgttcctgttcttagacctggacaagcccagcttctgcccaggccccatgctttacagggcctttctccaagttttcagaaaatgtatagctaatcacggtcctcattttttcacttggctgggtctctcccaaccctgcaaatcgggtaggctgtgggatttgtgtctatggggttgttcctggttcaattctagaagggcaaagtattgagtagattacctatgttacctggcatggtatttcttcccttttcttttaaataacagtactattaagatatagatcacacaccatataattcacccattttaagtgacagttcaatggtttttagtgtattcagagttgtgcgcccatcaccacaatcaatttcagaacatttttattgcctgaaaagaaatcctgtatcatttagccatcacccccttatctcccctatctctcctagccctaagcaaccactactctatattctgtctctacagagtttcatattctggacatttcatatgaatggaataatataatatgtggtcttttgtgactgaattctttcacttaacataatgttttcaaggttcacccatgaggtagcacgaatcagtacttcattcctttttatggctgaataatatgcaattgtagggacatatcacattctgtttatccatttgtccatgatagaccttcaggttgtttccaacttttggttattatgaatgatgttgctataaacatatatacaagtttttgtaaggacatagattttcatgtcttgagtatatatcagactggtgcaaaagttattgcggtttttgccattacttttgatgccaaaagcgacaattacttttgcaccaacccaataggagtggaattgctgggtcatgtgttacttctatgtttaatcatttgaagaacagtcagactcttccaaagtggcggtactattttccattcctaaaagcagtgtatttagggttctaatttttctgcatgctgtcctacccttactattatctgactttttgattctagtcatcctagttggtgtaaagtggtatctcactgtggttttgatttgtatttccctcaataatgatattgagcatcttgtcatgtgcttatgtgcttgttggcaatttataagtcttttttgaagaaatatctattcagatcctttgcccacttttaattgggttgtcattttattactgagtcataaaacttctttatatatgctatatacaagtcctttatcagacatagagttagcaaaaatttcctcctattttgtgaattgttttttcacagtcttcatggtgtcctttaaaggacaaaagtttaaaaattttatgaaatccaatttttctatgtttacttttgttgcttgttcatttggggacacatctgagaaaccattgtccaatccaagatcataacaatttgccctcatgttttcttctaagaggtcaatagttttagctcttctgtttggagttttgattcacttttagttaattttttccatatggtttgatgtagggatccaatttcatccttctgcatgttgtcccagcaccattttgttgaaaaaattattatttctccattgaattgttttgacatccttgctgaagatgaattgactttagatgtgaggattaatttctggattctcaagccagttaaattagcctacatgtttatcctatgctggtaccacactgtctttattactgtaacttggaagtaagtttaaaaatcaggaagtgtgagtcctccaactttgttctttttcaatacatatttttttctattccaggttccttgaatttctacgtgaattttaggatcagcttgtccatttctgcaaagaagccagctgagcttttgattggaattgcattgaatctgtagatcaatttggagagcatttgcatcttaacagtattaagtcttctcatccatgaacatattatatttttccatgtatttagatctttaattgccttcaacaatgttttgtagtttttagaatataaatcttgcacttcttttgttaaatgtattccaaagtatttcttttgacactattgtaagtgaaattgttttcttagtttcattttcagattgttcactatatgatatcacttttgtggcatagcatgtgattgctcatgaatggtgctgatacactgatttttaatgacttgtttagatagacaaaaacttcaaaataagatctgccttatgcacactaggagcatcctagcatctttgaattctgagacgtcattttattacaacagtttgtttattgatttatttgtcgagggccccctgtgggccagacattcttttaggagtgagaggcactgcagtgggtgcggcaaagtttctacccctgtggagcttgtgttctcatggggaagacagacaacaaactaaccgctaaccaaatacttaatataatttcaggcaatcacaagtcctttgaaagaaaatgaattagccttaggatacaaagttcaggggtacaatgtcagattcaatgggatggtggggaaggcctttctggggaggtgacatagggacagaattaagtgcagggtgagctgtgtggagagctggggaggacagtaggcaccaggccctgggtgggaacacactgcaggggatgggggaccgtaggagagccagcgtggccagggtagaagggagctgagatggggagaggagctgaagagttaggcagggaccaggccacgaagtcagatgggccatggtaagcactgtggcttttaccctgagtgtgatgccaagtcattggagaaattaccaagagctgcaggagtcagggaaggtgtcttgaaagtcaaggaggtaggtgagttctgcagggagaatctgcatgcgcaaagccttcagggtatggagagccaggcaggagcaacagcaggaaaaaaggtatgggaagaagctcagcctgattgaagcaaatggagtacattctggagcaagacaaaagagaaaaggggggagggttggcatgctctctggttgtataatggtctatccagaaggtagctttggttttagcccagagtttagcccagattcaaggcttaggaaacctagaattgagctttggctctgacgttgacttgttatatgaccttgggcaagtcatctcccttctttggggcttgatgttgtcatctgtacaatgggtgctttagaacaagaacaacctcaagtgtgttgcccctgtaatgcatatctttggagactgcttgattcaccaaaccctggacgagagcccttgctaggagagaggccttctgttagctgagctggtctatagcttctctaagctcagatgcttcctgccctgaggtttggcagggtgacagggtagagtgttactatgatatatctctccctttcatcattgccaagctaatgtgatagcctgtggctggtctgtagggcggctaagcttgcaaggagctaatgctggaaatgctggaagtaagtgtggcagagttgataagtggtagagaaaggagatggagacaggttaaacatagcaatgccaggcccaactacatcgtgtcctcccagaaaaagttgggaagccctcagacactgactggtccacctccattggtttgcagagaaagtggacaaggtccagagagggaatgacttctgctttaggtcacccagcaaattggaggcagaatagaaacatggttcctggttctggactcgtggtctttccactgcaccccactgcttctggcaagttgaaagccaatgccctttgggcaaggagaattaacaagaggtagagagaggaatgtgtctgaatgttggttagttggtaggagaaacaagaagtgagcagcctcctggtggttctacttctctctgatcaggacacactagcacagaggtgcagacccttgctctagctgcacctgccctggagccagcagcagagggtgctcaggaatcctgagaagccagcctgtgagccctcgctgtgccacacctctgtacccaccacaacctctccaccagcgtgatctggcccatgacactttctgctcagaaatctttcctttgctcacttgcagacaggactggggcaggactgtggcagcctcttccctgggctgctctattcagactctggggaacttgtagatgatgaaattgggaaaataaaagttgtcctcattctggtcaccactttgggaacacagttttgggaacacttgagagaggggctgattcgtatgcctctgacagactggcccagcacccaggagaccgcagcctcctccatgccaaccatggcacctgctggcatagtccactagtgccccagtgacatttgccacttttcagagtctttcctcactctttaccctctttaggccttagccagtctgctttgccaacttgggtgtggtggctactgtctttgctccagcccttaaccttgcgttctcctgtcctgaccatctgctcctcctagtgaccatgggggccatggaccccaagccaggccaatcagatcctttccctgggactttttgccacttgagctggcccaaaagagcttgttatcctttttcatacaaagctgtttagatataagccagagatgcctgtgactagtatttcaacctcctgaaaagctgaaactggaagaataaagtcagctgtcagagaaagagatggaggttagataaagcatcctagggtgcttgggtgcctgaatcccactgtacctggacctcccctcttttttgagagagctggtgaacttgagtttttgtagcagccaaaggaactctgactaatctgtggatctgataaccctggcttggccttttcatgggttgtgagaatctgatgacctgtccgtggtccaaaaccagccaggggtagatcttcaagaaggcttccccatcccaaactccttacaacagccattccactcatcatgtggaaaagtgggtaaccagaaaggacaggaaaggtggggacacataattgttggggcttgacataggctctctcatctccacacagttaatatggttttacgataaaacaaagaaataaaatcctattttataaatttaaaaaatcaagaccatgctgcttggttccttcaggccctggggagtctgtgtctcagctcaagtggccagctggacaagatgggtgtcaccctggccagcccctggaccagcctgcctcaatctctggcaggctgatgccgtgggttcagcctacagagtctcctccctggacatctctctggagattcagggttggccagggccttgtgtgataagaatcactgaatgtcagtgcccagaggaatctttgagatggagaatggagcaaggcatgagacaaagacacttggccaggttcacactgctgtgtggctgcaatatgctgggcacagaaacagacgcagggaaccttggcttaagagctcccaccactgctgctgtatgccacactgcttcctgcctggtccatcaatgtccccagcaggtgaccttggacagcatcccaggagccaaatgtggtcccagggtcagactgacatgacagggaagatctataggtctggtggaagctgcttggtggcatctcgcccaggagtatctaagaatataaaagggttagatttggggatatgtattttagcagattctgaaacttgcctcttgtatttttgtatacctatactctgcttcatgagctcagatataaaatctaggtctgtcttctctcctagtgcctctgttgcttgaagatacagaacttccttcaaagaaataggtgaatggcccatgcagtaaatgcccccaggactgaggtgataagctcctggcttttcagtagaccttctgcttggccatgctttgcaggcttctgatcactagtccaggtgactggttgaggatgaaaaagtcacctcttagcctcctccattactcctccatgactcctccatgctgttttcctcaagaaggaagctctgacctgctggggtactcgtggcttaccaacaccaagccctctgtttcacttttctccttgcaggggcctttctctgcagcggtccttctccttgtccgttggcctgaagcctgacctttggtaaggtcttcggccagaatggtatcatgagaaagataggcatgaggtgtagttgaatactgtactgaaactgaaaaacagaatggttgcataggtattttaagtccagtttcttttttctttttttttttgtttttgagatggagtctcgctttgtcgcccaggatggagtgcagttgtgcgatcttggctcactgctacctctgcttcctgggttcaagcgatcctcttgcctcagcctcccgagtagcttggattacaggtgcacaccaccacacgtggctaatcttttgtatttttagtagagatggggcttcaccatgttgaccaggctggtcttgaactcctgacctcaagtgatccatccaccttggcctcccaaagtgctgggattacaggtgtgaaccattgtgccaggccttcttgaagtccagtttctactgaccatgtatcactttctcaccatcataaaataaaataatcagtacgtcaaactatcgtatattggagaccatctacatcatatacgtagacatatcacatacatatacatacatatacatatatgatgcacatgtatacatcatatgcagtgatgtacttatttcttgatccaagtgttggttaaatggggatattcagtttgtaaaaaattagcaaactataaactataatcttgttataatgtgaaaaaaaaagaaaggcatgagggaggcagagcaccggccttggagtcagaacatctgggtttgaaatcctgactctactgaatatttgctgagccaagttacttcactttctcatcttccctacctgttgccctgctgtatggggctgattacacctccttcatgcccttgctcattaggagagctaaatgccaggcggcagggggacgaggtggtgtgcaaaagcttgggtcacagagcagatgatcaggaggtcaatgcctggtgcattaggccaccccagcacttcttgcaagaaagaacacaggagagcagcaagccagagagagctgagcttttgctggagtcatgtgacaggcaggacagtgactgaggatttaacgaaaggacaatttgagcacctccagttccaatgccaatgagtgcctctccctgtgtccccaggaccgggatggtgctagctgtttgtgaagtgcaacttgtccccagtaagcatctgttttgcttctctcagcaccagcccttcaggaaattcttggcaggccccctgtgtgctccaaagcgacgccttcccagctcactttggctgccagcagccttccagcaggggcttcttgctctgaatcctaacacgagcttcagcaggggctttagttgctgcactcagcaggggacaggaagggatggtggtggacggagggtgatgaggcagggggccttgttcagggtttctgggatgctgcggcagacagggtctgtctgtgcatgtctgcggaggctggctcatcagcctgcaggccggcctagtgcctcatttctcagtcaatgcccccagcacttggtgagctgggtcgacagcgggtgcagccactgagacaagcagccagatagctactggtcatgttgcttcaagaaaaggaagttaggccagccacagtggctcactcctgtaacctcaacgctttgggaggcagaggcaggaggatcgctagaggccaggaatttgagaccagcctgagcaagaccccgactctaaaaattttttttctaaaaaatcggctaggactaaacatgtatcccagctacttgggaggctgagtgggaggatcacttgagccttggcgtttgaggctgcagtgaattctagcctgggtgacagattgacatcctgtgtctaagaaaaggaaaaagaaaagactgttaagaatctcagtgatgcagaggcttataatgggcgcttgggccttgcctcttctttattcatgtgctcacatgtagtcattccctgccagcctctagttcagcccctgggcactcagtcagggacaggaagcatggcccctgcctctctgatgccctttgcaaagaccctgtcatgtctctgcctggatgacagccacagcagggcaagccacgtggtggagcaggaaaaccctgcagccagactgccttggctcagctctcagctcgaccactcctttgggttctgatttagggcaagaaacttaccttctctgtgctgcgaccagcctgatcaacatagtgaaaccccgtctctactaaaaatacaaaaaattagctgggcgtggtgtcgggtgcctgtaatcccagctactcggggcgatgaggcaggagaatcgcttgaacctgagaggcagaggttgcagtgactgagattgcgccattgcactccagcctgggcaaaaagagtgaaactacgtctcaaaaaaataaataaataaaggagggtgggggatgacagcagtccctaatttatatagttggcatgaagttcaataggttaatgagtgcaaagagtgtgaaatagggcctggaatctagtccataagtaacaaaatcataatgactcggttgtgctacctcttgagtcaccttcttctaggctatctccatcacacaaccttagcgatctttctaggtcagtctgatcatagtaaagtcattcagaggctccgttgaaagttcaaacctttccatgaccttcagacccctgctttcctcctcttgatcacctttccaaatggccatgcccacttttctcctctctaccttacagacactgcagatggcctgccatttgctaaacttgccacagcttctcatcctctgctgatcctgggggacctctcctctctcctccttacctccctggagtcctacatgggttcttcaagaggcccttcaatttgtatttgaaggtagagaatccttccttgatttctccttctctagccaaagccagcccctcctgtgacctctcccattgactgtctaccccaggtcttctgtgctaagcagtgtgttgtaaccgcccgagtaagcatatgtcttccattgaactcagtgtcctctggccatgtcggagtcctctctgggctggcatgagtagacccacaacaaacagttgttgaaggaatgaatgaacaagatgcttggtgaatgcttgccagattagaatgaagaagctgctaatctccttttgtccttactacaacccttaaagcagatggggagacactagcagcctgttgggacttagctgctactttgttggtataagtgacagctggctggccccaggcagctgcaagatatggcctggtccgactctttggacagtgcttactcttctccccagttagcacgcgttctgttgcctgggaggggtaggttgatgcacatgaaacatagaactttccagagatgctcaccacactgtcaccatgccacatttccttctgcagtgtgaacttgcccctcccccatgaagatgcagactcccatctcccccaccttgaatgtgggcttgagcctacttgatcaatacagtgggatggaagggatgttctgagacttccaaggttaagccataagaagctttgcagcttctgcccggggcctttagaattctctcttgggatgctccttctgggaagccagcctccatactatgagatggcaaagccatagaagaggccatgtgtaggtgctctggtggacagcctcggctgagttccctgcaacagcccagccacgtgagtgagccttttgggatacccagatgggccaaaccttcagatgatgccagccccagtggacatctgactgcaatcccatgtgagacctggtgcgtgagctgctcagctgaacccagtaaacccgcagaaacatgagagatggtgataaatgtttgtttgaagtcaccaagctttatggtggcaacagataaacaacaccaagttggacttggtgccaactggaggaagaagtgactgctgaccacttctctgtctccaaagggtgactccagagagcccccagcctatgatttctcaggatgtagaggaacggacttggaggtgggaaccacatgatctccattgtaaggcccactagcctctgagatgctttcttcaatttgcacactgctctggggcaaaagacagagggaaggttgggactgtttcaaggtctagtttcctcagactgtggggaataactagtttcaagtgcacaggtataatgcctttacacacaccctacatcctggtccctgtatggtctactccatgaaaatggtctagatgcttagtacatggaagacggaagcaaggaaatggtgatggagcacccattctgtgccaggtggctgacctccattatttcatttgctcttcacaacaatttgatgagagtagaagtattatccacattgcacagatgaaactcggtcagaaaggttcagtgatgtgtccacacagcaagcaagtggccaacctgaaaaaacccaggccggcatctctactgttgatgacttatgaatggtctcaaagatactgggaagattcccagggctgtgcttcatccccagctgctggtcagggcctgaaatcccctcattattgctttgctactttagcttaaatcctggatcctgccagtgccaatccctctggaaggatgatgcattacaatgttattaatcacctaccccaggcagactgaggtccatcgtctctcctgagagtctgttttcatgggagggaatgtggggtagaggcgctgctttcagggacggaagagaaacaggtggggtcataacacgttcctagttcaggcttttctccattctttccagatggaccttgatggtgggcttggaaaatcaagatgatagatccttagtatggggcatgggacaagccccaacccctgcctgagactggccttcgccaagcccagtggcagctctagaaaatatctctttctccagctaatgaagtccatccctggaatgagcatgggcacattcattgtcctcttcagcttccttcacatttggctggtttcccttcaagactcctgggagaggcgtgtttagttctgggctccaaactcaaggagtggcattaagcgactggtgcgaggccagagcagacagccaggctgagtggggagggaatgccgattcctgatagagcagtgcaagggttctccaaggggaggagacccgggggctggagagctggtttccaccctgaggataccgggtggctgagtgcattgctggactttgcccatgctcctaatccttctctttgggatggttccagttctggggaggcagaggctacttcacatgggtgatcatgatggggagtgactaccttgtcactggaggtggctgagcagaagacctaactgcccatctaggctctgcagagaggctcccacggaaggagaagggactgggtgaccttggagaccccttatcatgtttcattcccaggctctgagaaaggacaaccccatcctggtgcagcaagattttaaccccctggggtaaaagggggggaacaaattgttgtggctgtcccggcgctcaccaaccctcccggctccctttactctgctctttggaggtctaacttcccttcggcaaggagcccttgctcctttcttttctcccttcctgctttcctttcattcatttaacaaattcttgttcagcaaattctttcttgcaatgcctcctaggatattgggcaatgcgcttagtcttgggggaccctggagtgaggagaatgaataccgcccctgcccttatggaacagcagtggggagcgcctgtggaataggggagtgagatggattatagaagtcttgggggaaatccaagaaggttcaaagtgagggccgtgttcaggtaggagatggtgtggtgtgggctgggagggtggcagtgaggccggggaaactggatggagtccagagacagagaataggagaattcatcagtgcttgatggaatgttggctgtggcaggcaggtgaggaagacggggtgtcagaggactcctaggtcgctggctagagcccctgggtaagggagggggccagtcccagggatgcctcaccgcagcgatggcgtggctggcaaagctacctcatgctggggaaggcttctgtactaacgtttcatttcgggcaggtctaggaacagcgaccatgcatttgctcacatcctctctccagagcctgtccgcatcccttctgatcttcccgacagctcccagaagcaggtctttttcttaagatgcctcctaggtgcctgccctcctttctgccgcttctctgctcatcattgcagaggagcggtgattgacacacctagaggccaatgaactgcctagctccacccaccactcccaggttcgctgagtccctccccagctctctcctgttctcctcccgcaagatctctcacggtatcaaaataccagacacgatccagggcaataacaggcctgatttccacctagggagacaagggagggcccagctgggcctcttcacagcatccgtgatcgaccccacctggctggatgttgcgggggcggcagggcagtctcaggcttcccggccagagcctgcagccgggaaacattcctgccccgtttccatggctgccagtcgggcttgagccactgggggctgggggaggggctttgactgggcctgcctgttcgactttgggggatttggtagttctccctctccagattagctcattgtgaagctgctctgaagaactcccctttccagcagccagtgtgcatgaagccagttcactccctcctgggggtccctccctgtgggcgcgaagctcgtgaactcctgagtcccccttcctgtggatgtgaggttggggcacccctgggcactccttcctgtggatgtcaagacagtgcacccctgggtacctctgcctgtgggtgtgaagctggtgcacccctgggtcctccccgtgtactctgaggcactgggatcctggtttcaaggcttgctcagtcatctctggtggtgtaggtctttgtgttcagttttataagtggagaaaactgaagatgattctgtttaccttacccaccccctcacttacctcacctagctcaggggctgggtatggggtggtctcagcccaggacaaccttttaaatattaaacatggtaccatgcgatgtttgtcatacttatgacctggagaaatcaaatgcgattactcagccatctcaaatggggcaatgtgtatgctaacagctacccctcccgagggcatttcacacatgctacctcctgagcttcactgagaccatctacaggcaacaaaacggatacacagaaagatgggtggctgggctcactgtggcctgcagaggaaatatgagcttgacgtcatccccagctggttctgtatctgaacaccgagcacgaggaagtgatggtggccaggccggtctgtacctgggctcctgcgctctgccgcagcccagtcagtgtggttggtgcctggtatcattcctatgtaacagagacagaccagagagggaaataaacttgcccagggctgtgcagctgctcagtggcataaccaggactggaactcatgtcctcttcgtcactctcaggtgctcatcccactcatctcagcaaatcacataaagctctcggtggccttaacaccaggtcaggaggactagaaggggttggccacgagacaaggaggaagtcattgaggggtgaagctggagaccagccttgagtcctggcttgttactggtgtgaccttgagcaatttgccctccttctctgagcctccatttccttgggtgttgcccagggatgctgatctgtggccagcttcccacaagcagttgctctgaggacaaagacgtgggatgggagctggctctgtggacaggcaggggcagctcccccctgctcccctgccatggagctcccttgtcctgggtgagtcttggccaatgccccagagccctgcacagtcccaagctactgtgggaaggcagggagctggcttgtgcctccccagtgtcgacacatccgttctcaggggctctgagatggcctctcttggcctggacgtgccacaaacagtgccctctcccctgcctgtgtgtgttttggggctggctggcaggctcaggaaagcagcctggccttatcagaagccctgggtctccagtttctgggaactgtctccgctctgtggctttctttcccaggtgctggtgccaagcaggctcagtctgagcgtctggcggggttccaggcattctgtgtcaagcacttctcagcagcaggaagaccaacttcatggaggcctgaagggacccagcaaatgacctctgtctgcatggccctggcttaaaaacaggagcatggttgttagcgccccctaatccacacaggggaccaactcctcctagttgtgtgggctgggctgggaactcacaccaatgcctgttagccgcctctagggaggggacctgcatggaagtgtcatcctttaggaggcatgaccaggtgcaccgtctccattcatgctgcacagggatggaggctcggcgcagagaccttgctggcctgtgttctacaactcccatcacccaagagagtcactccacatccctgcgagatggggatcttgactgtcagttaagattgagacaatggaggtgctatgaggttgagaacttctcagtcaatcagccatgtgtggctgagccaggtttgaagccaggcagttggggtccagagcccagttcccaccttaacagcacaggagggggtcctaggtcttctggtcccacagcaacctccatgcccctgccccctccactccctgactccctaggagtgcaatgcatcttactgaggtggagctggctcagctcagtgtaggtgctacatgtatagatgccaggtgggtttatgttagctagggtgcccacaaatagggtccaggtaccaggggcagggtgtctcagaagagttggcagggatataagggactatgtgataaggaacgagggccctgtatactacccagcttgaggtctttgtgggggacagggtctcagccctctgttctggtcccttgtgtggatgagcagtgttatctgtagatacctggagcccagaaggtgggagaggtggcagtcctcggtgcctatccactgtcctctcctggcagactcccctcctggcagagcctctctccaatgcccgtgactactcaatcatcctctttctcttgcttgaaaatttgatgggacaactctgcatggctttcttggctctccacactgcccccctagccgaggtcctcactgctctttccatgctccaggctgatcttctccatctcagtccctgccttccctcctctgtgccttggtcccagaagcttccccagtcaggccacgttggagcccatctttaaggaggagacctctcccctaccctgggctccttcagcatcctaggccactgggtgtgaagtgaccgaagggagtaccatgggacaggcctctggggccctttgccttctccagaccatgagatcctggagggcaaattctacagcccattcattttcagtttcccaaaatgtttgtggattacatggatgaaggaaagcatgcatgagccaagaatggaggcgatgcgatgggtctgggaaccgggagacgcgagtccctttcccttcagtgtctcaggaggagagtggggaagatgccatgtgccctgagatgattttcttggattccttgatgggccaccctttggggaacatttgcattttaacattgaggggagctggcaaatggtagtggattttgggtgctgtggcacccattgcagagggctctctggccggccttgctcatgctgtgggcgggtcccttgtctgggagtttctgcgctcctgtgctggctcccacgatgtccccctttgtaacccctctatccggcctgttcagggaagcatgagctcttttctttgctccagctcattggggtggtgacattttaaaatactgttaatagctgatatttatccaatgccacatggagtctcgtagctgagcacttacatactttatctaatctcatctgcacaccagcattgtgagataggccccgatgaccatcccatcccatattaccagggaggcctcatttatctccatgcccagataccccttcagaggcatggatttgcctgggcgaggatcatgcttaattttgctccataccatcagcccccaacagcaagtgggtgcttcatattggttggccaaacaaggggaaaatgagtgaatctgcaactccgacccttcccacaggcctcactggaaccctaatttaagaacaatgctgtagtcctataatcttaaatgaaaaagcaggatgtgaaatgtggtgtgtgcatgcatgtcacatgtgtgcgtgtgtctgtggaggcagggcacgtaaactggggaggcttggaggtcatgactggagtgtgggtgctgagttctgctgtttggggcatcctggttctgtgatttgggatgagatgcctaagctctctgggcctcagtttccccttctgtaacataggggtaatcacaatacttgacagggttattgcgaggacaaagtgagttattacacacagagcacctagaacaatgtgtggcctctagtaatcactaatgaagtgtttgttaccataatcagtaaatagggatgggaggagctagatggagaggtagacgtattgataacagtgcatgggccttgtaagggagtaaccagtatatttcccttattctgcatacctcagctccttcacctctcccacaaccctgtgtgacacctgaggcagctcaattctctggccctttaaacagagtgtgtattagtggagaggtcacataaagaggaggtggtggcccatgcagaggccttgtggctatgaggaggggatgctgcagggtgacacagagtggactgaggggcctgggtcagcaaggccatagagagttctgtgatgaccacagccgagtgccagggcaggacagctgaccagacatcaactctccattgctgcccaaagccccccaccccatcctcaccggcaacttagacaagcctttcaggaaggaccagatggagggagaaaaattctcagttgactgagttgtaatctgcatttaccaaagaaaaaacttgaagtgactgaatttatccaggattgactagagtggaaatttctgctttcagggagaatgaggctcaagagaggaatgaagttcagtgatagaaaaataatgaaaattatatattttgtatacatgcctatgtggcttatgaaaatctcaccaccatatgttatccttcctgtatataatttcaaaatatgtgtacttatgtgtgttaatatatataaactgaaagaaagaaaattaaccaaaatgtattggttatctctggatgaagggattatggactatttttaattttccttaatatgctctactgtatcttttcaattttctaaagtaaacatgaactacctctatgatcagaaagagaataattatatagctgtgaactgtgggtttacatagttcttcaagtcaggcagattgggccagtaggtggtgtgaaccaggtcacaggaaggtgttaggccaggggctgtgtcctcagagagaccctccctttcctgagcccgtttgatggggatcattcatgtcacatgtgtctacgtgcagccaggaccccataaatattccttcccagaaaggaaggcagagagctttcagtcctgtcctctaatgctagcaggaacaatggcctcccctttacagattagaaactggaagctcagagaggtctagtgacttatgcagggccacacagtcagggagcagccatgctggggttggaactcggacttccagaccaggtgtgcctcacaccacgccacctctgttggtcagcaggaagtggttccaggacaaatctccatgcccatgtcctcaatacctaatggggatttacgactcagagaaaataaaagcttagagggttttttgcaccttgtccaaggtcacacagcaagagcagagttggcattagaattctcatgcttgatgccagaatacgaagatactcagaaaagagtatgatatgggacaaaagggcaaaaaaaaaaaaagcaaagaagtgcgaagacaggaaagagactacaagtgcttcctgaaacaaagaacacagtccagcatgtgtgtgcgcgtgcacatgtgtgtgttggggggtgagtgggaatggtgttgtagtgtggggggaaggtaggagctgagaatgagagtcagggaatagggcagggggaaggagaaaagagacagatgggaaacagtccgtgaaagccaaaaacctcaagtcagacaaatgtttattttatttagtgttgataacagggaaaaaaacgctgatggaaactcacaaatagcacaggctagtgccagctctttagaccctagtgggaagtgctagaatgtgcctctgcccagcagggcagcccccctgccgaacatgatgcttgcctaggaacctacctgaggagacttctccagtggaaagggccctgaaatgggagcctggggctaactgcacaggcaggctgctccgttctcagagtgccaggtccttgtctgtgaaggcaacgccgtcattcctgcaccgtccacctgatgaaaccactgggaggacttcacttttggccaaagtgggatcacaggaactgtctccagcttcctgcctgaaatagcagcaacaatgtcagcaacagcaacaaatagacaaaatctatgaacccacagttttcaagacagtgggcctcaggaagtgaactactgtgatttctcagagatgggaaacaaggaggtgagccctgggatggccccaggcacctgcctggagagagagttcctacgctgcagcacagggagggggacccaaatggagcccagtggactccctgatttgatgagatggagctgagagtgaagggacacccaggtggcgagagttcacaggatggaacacaggacagagtactggagacaagacatacacacacacacactcacacacacacctctagagagctgcagagactccaccaagtactcagcagagttctggtcagcacatacatgtaaggaaattacctgagaccaggaaagaaaacccgctaaaagggtttgagggaacagcgtggaggacccacaggggtgtgaatagtttctgttcccaccagctaggctggaaaaaaaaatctcataattcagagggaaatgagtagagtactcgaatgcatgatccttaatcaaatgttcctgttattccagaaaagatgtctaccccccaccctagttactttgaatcaagttcagactcagccctgtctccgcagttggtttttatagctctgaacagatcagcctcccctgaccctctttatttctcatgctgttgacttggtgaagaatatgggttcattgttccatggggcaccctgcatttgggatttggttggtgcccttcttgtggtggtgttgaactctttcctctatcctggtatttccttacgctaagtgttaggtccaaaggcttgggttcaggccctattcttttggcaagaatccttcgtgggtggcacttccttattaagatgaagtgtgctttgagatggtaactctaggaatgcaccctcggctcatcagcatcggctgctcattacagctgctgggaatgcagcctcctggcatggtgttttgcctctttctgtcccccactaaaaggcatattaagatgcatgtaggtcagaataaggttcatgtgtggacagccttgaatccactcttagtttttaaaatgtcttccagaagtttgagtcttttttttttttttacaaaacctggtatttataacaaataatagtgaaacatggtgagttatgaggttgtcacctatgggcctacaaagtagggtgaccagttgtccctgtgtgctgggggctgagggatttcccgggatatgggaccttcattactaaaactgggaatgtcctgggcaaaccaagatggactagttactttactacaaattgtagaattgtctggtagccaggattataaacaagcaacttagtgtgccagaactacccaggctttagatgtggtcctgtcccctctttatgccatctgagtaagtgatggttgtctgggctttccagtgatggagacactagtccttttcctaagggtgaataagtttaagtccttttcctattcactccattggtggataagttcaactgttagaaaatttggccttccagtgaattccatgaacccacttgtgagctggaattttaccccacagggccaagcatatgatgttaatcaaccaattggaccattgaagtccacaccatggaccttccaagcaaacatctgcaagtacattgctggtcatgacattaggacccttccctccactttcccacattcctcaggacacggtccaggacttggcataagaggatcactggcaccagaacagaggccagactgaaatgcaagaggaccctctgcagaggaggtttgcctgctccctcttgccttctagaatctaggtctgcaggcattcccccttaaccctcaagcctagtgcaatctgttcctctgtgcatgggagagatgtgctatcaaaagggaaaccttgtgtgtccttacacctctcaagtggatgggaggggaagggagtgcctgacttcatccattaaggatgaaccagctgttctagcctgcttgagaggatttcaaactagagccaagaatttaacttcaagaagtaattttaccttctgaaatcaaatcatctaatttacagggcagttgttgaacaggcattcccattgggtttaatgctgcagcttttccggaaacttatgtggaatggaggtcaaaattttatgggctcagatgcattttcttgctagctgagtgactgttttcaggacttctggctccctccaagatgcctctcctgtctaaccagctcagtggcatcccctctgtcttcctctcttctctccatgattccccgaagagcccttcaatatgtccctacttctgatccttcccagcctgtcctggggatgccacaagccttacctttgctaattgcctgctttatcctaactgcccacccctcccaaccttactccccaggtttgtcttccaagggcctcattctctggctccatggacctggccaaattctccctgtccttggcctccatcttccttcttcagaaactagtcaaacaggttctgtctgtccccactttggtgttggtgaatacttctttctaggctgacctcctacaggcaattttccctatgattaatatctttacgttcctcactgacttctccctcctctgacctccacctctgatcaccagtgttgcacaaaccaacacagacaagtttctcttccctggtgggcctctttcttctctttggctaatttgtaagtccctggagggctgggaccaaaagtctatgccagagagagtgagtactcattaaacctctcatgtgcattcctaggtttccagcctttcttgctggaagatggggccgtgtgactagctgtaggctgtgagcagaagtggcatgtgtcacttcctgactgaggcagttaagagctggcagaagtccttctccattcctttcttccatgccacaatgactacagatgccatgtgatccagatgctacacttataagatgatagatcctctgtcagcctggttccctgaatctgtgtggattagagcttcccactgccctacattagacatgtaatatgagcaagaaacaaactccatcatcttaagtctctgagatttggggctttttctgctgcagcagctagcattgctcaatgttaatacaacatcttgtttgttccctccatctccactgttctctgcctggcagctctgagcacagactggtcacccagcatggattcagtgagctttttcatctaaatgatgaatttcgtgggatgctaatagatatggaattcataaatggaacagcttaagagggtgttctcagcggcatgcccagtgaaaactactattgaacttgacctcctggataggccactatccatcctgacttcattggccaaaccctgggatgctgtagcatgctgacttagattcaaaatcaggactgagattcctttagctgttgactttgggataatcatgtgccctctcaaagccacaagttccacatctgcaaagtgaccaaatgatatcagagctccagaggacctggagtccccatcactgcccttctaggaaggccagtctgtttccaggagacaggggattctggggccaacactactgtggtgatgtaggtatgatgctcctggattttggaagtaaagaaggtaaaactgtagtacaatagagagaggcactttgtagagccacaaacccacagaccatggcctgccacatgatccaatcattgcctttccttggactgggacaggctggcaaaccagagctcaaactatgaggggacaggtgatccctgccctcaccatgatatgagttgaaacttgtcaggccttcaggggtgtggctgtgtctttttcacaatctattcccagggcctactcagagcctggcccatggagagtgcctaagggctactgacatccccagtggtggcaagtccttgtcggcaggatgtgttagctgagtccagtggtcactgggcagggaggccatgtgaggcgttctgaacagagagatgaccatctagatatgtctgggctgagattcctcagtggcttcccgggagaagccaaggggacacctgggaagtcagcggcacgggctgcaggaacaggaaaggccacaatgaggtaaggccccctcttgcctctatgctgaggtgggatacctgcaacacatgttcttaacatatgttaaccttggtgctttcctcctgccaagaagctgtcatggaggcatttagcagaggaaacggcgtaggaaacgtttctgttgtactttggggcactgtgcaactaatggggcatgtatgacgggggctgtgggtgggggaggtgggcccccactgaccctgccaaagcctgtttggtccagcaccagaggagcaagtgtgaatagcatttggcagctgaagccaagtcccctcggctgtcatgtgggatgaagcactggggacggaggctgagcacctacgatgcacagggtgctggctttgggcctcacgcatctgccgtctccctgcaccctcaccacagccctgccatatagacatcgtccttccagttacagattaagaagctgccttgaagtcggcctgactccaagcaaatctaactctactagaactcaaaggaactcacagcagtttccttggtgccatgaagccaatgaacccatttaggacacggagaacagcatgcaacatgatctgcaagttacttgtctgaagttcggggttataaggtagcctaaatgaggatgactttatatggcagaggtctggggacaaaacatcaactcttgaggttgggatcaggctgtggttttcatcctaggaaagatgtgtattttgtggcttctttctctctccagttgcaaacacaatgtacataggcaacgcacacaatgaacacacatatatctgcatggatacactctcttttttttttttgacagagtttcactcttgttgcccaggctggattgcaatggcacgatctcggctcacctcaacctctgcctcttgggttcaagcgattctcctgcctcagcctcccgagtagctgggattacaggcatgtgccaccatgccttgctaattttgtatttttagtaaagatggggtttctccatgttggtcaggctggtctcaaactcctgacctcaggtgatctgcccgcctcggcctccccaagtgctgggattacaggcgtgagccaccacgcctggccattgatacactcttaaaagcccacacacctatctatacacatcctcactcacgtgtatgaacagacagtcacgatgatgcttacatgtgacacacccacatacacctgctgtgtcctctcacccacatatccacaggactacttgctttatagacacagcctacatcaaattgccttcacacacacacacacacacacacacacacacacactccctctcaggtggacatgctaacacacatacacaacaggctaatccacatagcaagaaaactcacatttacacagctctttctctgagcaaagaaattctatcttttctaggagagaacaggaaagcgagctagcagttcttagctgctttctgtcatctcccacaactctcaaaggcgacgagctttttatgcagaaaaacaaaagcaaaagagggcaggttggaagtggctgggggcctagtgaggatctctccggggatgaactgctcggtgtttttacccctctagatttcagtttccgcaagtgttaagtgaggataaaactcccttccagccccttcccacggcctctgtgggtatcatatcatctgatacagggatgggaagctgttcagacgagtcctgggtgggccccctcaaggctgaattccctattaccagtcacagagcctattccaaggtcaagccatgccctgctggcttgcgtggggaaatgtggcagtgacaccctgaagggacattcataagggtcacactgtcagagctgcacacgctgtcaccatgaaagagtctcccttatttcacaggtggggaaactgaggcacaggaagattaaggacccagtgcttagaacaacgactgtcacttcccagttccccagtggacactggaggaatgactgtcggatgctgctcttctgccatcttccaagcagctcttgaggctttgagggcttggagtatgagggactcgacaaggcaatattaaattttgtacaaagactgtgggaaatttggaggctgatctgttcctctagtcctgggtgacgcaaccactcttccctgccttgtgtcaacacctcacccaggacatgagaactccccttcacccagctcattgggatttgctgtgcttatgggtgtacacccactacaggcacgcgtgggaacacgtgtgtgcacgcacgcacacacacacacacacacactcttctctctgtctctttctctctctctgtctacagactcacacaagaaaacctgtccaggttggtaatatttccagaaaaagcagatacagggagaggcagtaggagtccccaggctgcctgcccctggggtcccaaataacatgtccaggtgattggtgttgacataaactttaatgctgagtttctagccaagcaccgggtctcaccaatgtcagggtgaacacagtctagtcccttcccttgtagagcttatattccagtggaaggtcactgtgtggtcagcaacatggaggggcagagcttggaggagggctaataagacacatgtctaaacagggtcctctgggtgccctgaagaaggaatgatggactccttcctgcaggggctctagccaagactttgccaagaaggagtatggaagactgtgaaggccgcttgaatgttgccaaataaaggagtgtggtagggtgttctaggccagaggacagcatgtgcaccagccagagggtgaagcctgcagcatatttagggcagacaaggggtcctgtgcgaccagagcctgagacaagaggggccagagaggcagcatggagacaggtgaggaagagacttcagtgccttgccaagggtttgtctttattctctggatggggtagggatcatgggatgggtttaaagagagaagggacgagatcaagtgtgtggttgcaaaggttacctggtggcccgatggaggtgaggaaaccggcatctaactaaaggcaccagaggctgaagcaaggaagatgcaggggagctactgccttcctggctctcccaggtcagtcaggaggtccttgcaataactggggcgagactggtgtgttggaactgtcccaaaagaggatgtgggaagtgagaggagggatggatcagtgaggggtcaaggagagggaggcgtcaaggacggtggtggtggtgccagtgccccaggtttggcggggagcagggcggactcaccttccccatcctggaggaggggcaggcagtgaggtcacatccctcccccggctgtctcggcaggaaccagccattgtttgtcagcctgtgctgtcccaggagctgcggcttagaatattaaaatctttctcaggtttatctcctccccatctcgctcatttgaaatccctgcaactggggggagaaagttactttaatcctctggttcctatcagcctaattacagtttcaacagacaacggaccgggctctaaatgagatctgaggacactggaacacattatgttggcgctaataatggtctgtctttgttttatcatttcttgttgttgcttctcattttggctgcctgaattcttaatgcctttgagtgtctcggggagattgcttcctcttgctggcaggccgggacacagttccagacttgcatatgaaaatacccagcctgtgcctgcagctaacacgccagccgccatttaaatttcaatcagcccttctgtttgtgtgtgagttccttggatggatgaaattagcaattttgaaaaattgattaaaattgctggtttcacgaagcctcaaaacatcaaaatcaatctttttttaaaaaaaaaatacaccaaaattcttgttggacttaccacgtctgcagtatgagaagctgctgattgccagtggggtggtggggacctgagggctgggtgggctggggcttcttttggctctggacacactcctatgtgacctttttaagagtttgactcttgctgggtctcattgttctttcgtttgtggaataaaggggtttgactgaatagggcacctctagaagactcttctccagccctggaactatgtaatcatgtgctctgagtcaggtaaaaaaccaatgaaactttgcaggtagaatctgcatttagatgagggtgagaataccaagaacagatatcatattagctaacattttgaagtgctaaatcaggtgctttatgtgcattatttacacccatttaatcatcacaggaagactatgagaaatacaatgattacccccattttcagatgtggaaacggaggcctacacctttccccacatccaggtgaatataattgcaggaaaagtctgctttgatccatccagcagaggggtctcctagggcccccctgcaatggctctgggggagtcacacatgtgattgacgcatgtcaggctccctggtctgatggggcagtggacgttggcagcagacattcgaggcctccctgggtctgctctcttctctgagctttgagtcaatgtcttgaaagctctattcatcacctttgcagcagagacgggtcaaagaagtgaaatggtaatcaaagacacgcatgtgatatttccccaaatagtgtgacctgctcaacgacacagaccaacagtcctggccactgtctaggcacagagaaaccctcggtcatcactggttgttttgaggaaaaagaaaacactctgggctggccgcgatggctcacgcctgtaatcccagcactttgggaggccgaggcaggcggatcacaaggtcgggagatcgagaccatcctggctaacattgtgaaatcccgtctctattaaaaatacaaaaaattagctgggcatggtggctggcgcctgtagtcccagctactcagattgccccactgctctccagcctgggcaacagagcgagactccgtctaaaaaaaaaagaaaaaaaagaaaagaaaacactttgctgctctgggcagcagtaactttccttcgcctcttctggtcccacccttcatgaacctccacttgcctcgaaggggagaaaataggctaccctcttccagaaactaggcgggtctgctccttccactgcagtctgagtaagacaagtgtcacggccattttctgccttttgtgggtccccgtggcacggctgccgacaacacttaatcacaagaatcaccttcgattcttgtttaaaaagccaggctgctcagagcctgctctaccctttctgaaaagagccctcgcctgtctgggaagccctgcttctctcaacatgctgtaagtgtatacggggaccatattctcgccttccaatttactggccaagtggctagtgtgcagacagttcaaattctcttccctatctcatgaatatttattgaacacctactaacgttaatgggaaaagatagaggtgctatgggaaggatattttttctagatttagaatagaatctatcaccagcgtttcctgactttgtgaagtcacttaagtctttgggacttggtttccctgattgtcaggtaagaacaatatccctctctctggactgtcttgaggagacatggaatgcatgtggaatgtcaatctggtaaaatgcctgacgcctaagtagatactctttctaccagagaaaacccacccaccaagagccctgtcccaaggctgctgtgaatccgcaagtggctggcatagtctgtaactcctccttcaagagaggaggatgctggggggttggttaagctcattcaccagagaagtgacctgcccctgtttaccagcctcatatagcatttttttttcttttttttttttgagatggagtcttgctctgtcgcccaggctagagtgcagtggtgccatctcagttcactgcaacctccgcctctcgggttcacgtgattctcgtgcctcagcctcccaagtagcagggattacaggcgcccaccaccacaccaggctaatttttgtacttttagtagagacggggtttcaccgtcttggccagactggtctcaaactcctgaccttgtgatccacccgcctctgcctcccaaagtgctgggattgagaggtgaagccagctggacttcctgggttgagtggggacttggagaacttttctgtctagctagaggactgtaaatgcatcaatcagcactctgtgtctagctaaaggattgtaaatgcaccaatcagcactctgtaaaaatgcaccaatcagcgctctgtaaaatggaccaatcagtgctctgtaaaatggaccaatcagcactctgtaaaatggaccaatcagcaggaggtgggcagggacaaataagggaataaaagctggccaccaccccccactccaagccagcaggcaacctgctccagtcaccttccatgctgtggaagctttgttctttcgctgttcacaaaaaatcttattgctgctcactctttgggtctgtgccacctttaagagctgtaacactcaccacagaggtctgcagcttcattcttgaagtcagtgagaccaagaatccatcagaaggaaccaactctggacacattaggacatgggcctggagctgctggggccatttctgccaccttgtagggacagccagctcgaggatgaagtcaacagagaagaacggaagctgagaaacagaactaatcattccacctagcacctgggttcagccaggactaacactggtcatgtgagttgataacatttatttttggtttaatccaggctgagctgggtttctttcatgcttagacaaaagtaagtgctgaccaaatcaaagctttttcccttggctgggaaaccctgattccccaatgcaatggctctgctcatgtggtgctgagggcttacaccaaggtggtagagaagtccccttgaatagaactaggctttggactgctgggctgcagtataattgaggtcctggagagggagccagttcagggaagaaagcaccaataccttgagcctcagtgcgaagaagagcagcctggaagcaaatgtgtatatttgcttgaattgatatatatatattaattcaacatcatttatggtaaaaacttgcagtgcaagaatacagtcttgcactgcaagtttttaccataaatgatattgaattgtgtcaatttttttcaagattctattgagataatcatataaattcacttatatttgaatattaaactgacctttaattcctaggataaaccccactgggtcatagtgtattatcatttttgtattaacatactgttgaatacaatttgctcatattttagcagcatttgtgctccatgaagggtattggtctgtagttttctattttaatatatgctttctggtttaggtatcagaataagtttgctcataaaacaaatggggaagagttttctttgttttctaaaataatttgataggtctgatttttttaaacctagtttttaaaaatagaatctgccagtgaaactattggaacctagtgctttccttgtgggaaggtttataactacaaattccatttcgttagcacatacagggttatttatgctttctatttcttcttgagtgagctttggtaatttgcacatttcaaggaatttttacattttctctaagttgttgaatttgtgacataaaattgttcatgctatttccatattagccatttaattaaagtagggtctgtaatatgtcgtttttttcctgggattggtaaggtgtgtcttctttgtttcttggtcaatctggctagaggcctagcaattgtcaatggtactagttttttgaccttgtagaactaccagcgtttgtactcatttccctctgtgtttgtcattttctacttcagtgttttatgctcttatttttactattttcttccttctactttctttgggtttattttgtccttctttttcttcattcatcaaatagggccttaaatgattgactttaggactttctcctttctgatatcaatacaaagttgtcattgcatcttagagctgctttatctgtatttcacaaacttcataagctttgtttttattttcatttagttcaaaatatttaaaaatctcccttgtaattcattctttgagctatgggttatttaaaagtgcattgtttaatttctaaatattttgggcttgtgcatatatcttattattatgattttaaaatttaatcccactgtggccagagaacatacacagtactatgtcaatactttaaaacttactggtatttgttttatgtaaattaccttttgtcatgcacaccagactatgtggtaatgtacaggtaagtcaggtcttgtggaaaaaaaaggtctgattggtagtatttgccaattttcatggtataaatacttgcaccgtggccaaattcaacataatgttactaaatgtactattggaaagaaatgtgcacaattttgtgagctgctacaagccagctccagcacaacactgggaatatggtctacttggtaagtattccacgtgcactggaagttatacgtattttgttgttgttgggtagagtgttccataaaggtctatttggttaagtctcctatatccttatagattttctgtctccttgttctgtcaattactggtaccactttatgtgtgatataagaatcttatagcaatataattcctttcttccctcctgtcctttgtgctgttattgtcacatattttacttatacatacattataaaccccactccacattatttttacattgtcatcaaccgccttttaaggaaaataagaaattagaaaacacaaatttttttttttaacctacctgcatatttagcatttctgggactcttcattcatttgtataaacttgatttctgtctgatattttccttcagctagaagaactttgtttaataattcttataatgcaggtatgctagggataatgaaaatttgtctgaaaattctttattttgtctttacttttgaaggatattttcactggctatagaattctagatcaacagtctcttttcctttcctttctacacactagagatgttccatcgtcttctggcttgcgtagtttcatgtgagtctttattactttttagttattttactctgtacatgagtatttttcctctggtgacttttaagatttctcattttcataaacttggttatgaaatgccctgatatgattttctttgtatttatcctgactggtgctttcttgagttttttgactatgtcaacttatattttcaaaaacatttagaaaactcagctaatacttcttcaaataattttaatgctctcttccttttctttgaagactctatattatgtaatatagttgtgctattgtgatataataaaaaatacatattctggcttttgtcacagcttctggttcccagctcctacaaccctcataatttcccaagtgactagagccataggtgtatttttttgctaaaaaaatttagacttttttcctcagttcctgaaacagctgcatggcaatacaagtgaaaaacatgtgttttattattcacagcaggtctcttacaaccacacctgagtttatattaatgaagtgattatttttggaaagcccttagataatcacaggattggggctggttgccagtgggactgaccatgtgattggagggttgaaacttttggccccactccctcaccttctgagagggaagatgggctaaaagttgagttgattaccaaatcactgtgatataatcaatcatgcttacataatgaagcttccataaaaacccaaaaggacagagttcgaggagcttctaggttggtaaataagaacacattcatgcactggaaaggtggtgtgcctcaaatccacagagacagagctcttatgcttgggacccttctgaatcatttgtgtgtctttatctgactgttcgattgtgttgtttacaatagtctttgtattaaatgggtaagtgtaagtataacaaaatgtttccctgagttctgtgagctctctagcaaattaattaaacctgaggagaaggtcatgggaccgcctagtttagatctggttagtcacaaggtataaaacccagacttacaattagcatctgaagttgatggggacagtcttgtggaactgagtccttcacctatgggatctgaccctgtctccaggcagatagtatcaaactgaattgaattataggacacccagctggtatctgctgaagaactggttgtttgtggaaagaaatcttcacacattttggacacagaagttttctgtgttgtgtgcaagggtagacagaaaacaatgtgtttttttcttcagaatggtagatcactgaatattgtcctttatgtcactgaggctctgtttaatttattagctttttaaaaatatctctttgcttctatttggatagttcttgccttctattcaatcttatttacaacttctttttgcgatgtttaatctgctattaagcctgtctggtgaatattccattttagatattatatattttttggctctaggtgttctggattaaaaaaaccttttatctcttcagtgtgctatgtttttcttaagccttgaatatatttataatagctgttttaaagttcttttctgcgaattctattacctctataatttctggtcttgattctataggtttgtcctattgaaatttattgggttactttttaatttttttttttttgcatgtttcgttatttttaattagatgctggacattgtgtgtttgaagttattgaatgtctagattttgttgtgtgtgtgtgtttttttcccccataaagcacattgagttgtgttctgatagccagtagttcactttcaggttatcttgcacttttgagcttggttttaagtttcatgggatctaaagtagtctttactcaaaggacagctaagttataccaccaaggtgtgccttttatgagacttttcctaaatgctccaagtgtttgataaggtttctttatttggtcagaactcaaatgtctctcaaccataccaagctttagtatttattcagcttacagttccctggtagttactccctgtctggtgattgttctttgcctggcttaatggagtctttacacatttatagcatagtcttcagtcaaagactcaggggatcttcatgacaatatctggacctcctcctctgcatagcctcttcctctttagttttctgccccacaagttccagcagcctcagccttcccaaacttacatctctgtcttttcagctcacagagactgcacgatgtgcttgggttcttgtgaacaatcgccatgtctgctaaatgcttctaggcagaaatctgcagaattgtagggcacatctcctttgttttctttttcttagtcactacactactatgatgcctgttgttcagtgtctgaaaacattcgttttacgtatttgtccatacttttcccccattttagatgatgtggtaggcagaatatggtcccttaaagatgttcactctggaactagtgaatatgttatgatatgtagcgaaggcaagttaagattgcagataaaattaagactgctagtaaattgactttaaaagagagaggttattttggattataattgaaaaggctcctaaaagtggaggaggaagacagaagagagagaagcagaaggatggcagtgtgagaaggatttggcccaaccttgctggctttgaagttagaagaaagaaaacatgagccaagggaagcagaagctggaacaggcaaagaaatggattctcctgcagcttccagaaggaacacagcctgctgacaccttgatttcagcccactgagactcattttgacttctcacctccagatcagataataaatgtatattatgtgcagcaggaataggaaactaatacaagtgggagagctgttctggtactatcactctatcatgactgagaggagacatttactatttttatttttgtttgtttgtctttaagaaaaagatacttgagacccactacagatatttcgatttggtcagaacaggggcattaagattttttaaaattttcttattgttctaatgtgcactcaaggttgaaaaccactgacccagtccaaccctgtcaatttacagctgaggccactgaagtgaagaagagttagaggcaaatgcgagtgaaatttcagtctgttgcaaaagactctgcctagaggaaggagggtaggatatatgttctcctaggaggctgtcttttggcatccaggcatttacaattgtggcaggaggtccgcaatgaacttggatgaggggtgtatgtcctcaaaaatacaggagcaaagaccaacctattagctatgcaaaactgtggatttctgcagccctaaaatcagttctatcagccttattaccacagaagtgcccacctatagacctggtgtgagtcattggttggttttgatcaagttgatgagaattctgctacttaacagacttcagcactctggagaaccacagggtgcattctgccaatgctcatatcaattccttcttcaggtttacatggcaagggtggctctcagatctcaatcattccatgcatttaaaaaaacagtattttcaccgagccagcaggtgccaaacattgcctagattttggtgttcagtagtgttctgcgatttattgattcatgttcaaaatttaagagattctaagattcattccttcatgagctcatttggtaaaagtgtttctcctttcttcttcccaccacttttccatcccttccctttctttcccttctgttttctccctttgtaaagttaaccttagattggtcacatctgggcaggtaggtgcctccgccagtggagcacattcaagttaataaggagttggatcattccaggacaccttgactggaatattttgctaatcccacaatgtctctatatggttcttagctgctacccagcttaggattttaggctgataacatcttacacctttctgtagatggtcagatattgcctctctgcttctctttccacagtgtgttctgagcttttcttggacctcaacttgctgtttagtttaggaaatcttagccagcaagctggcactttgtaggtggctggggaaagatgcagaaggcgaagacaaaagagatggttaacacttatggagtgtgtaaaactgacctgagtgcttgaccctcagagccaggctatagacgggtattaaatattacctttattttatatgagaggagacccaggcacagagagattaagtaacttttgtaggaacacataataaataagtagaagatctgggatttgtgcccaagcagtctagagtcttacgtttactctactgttaaaggatcagccctgcatttggattaaggtatgtagcatctcaaagccatgctccaaaggaccaaaaggcattgcctttgctgctggccatatgcatgagacctcctccataagctaccacaattgagtaaaaacatcagttgtcatagtctctgcattcagacagagtctgaatttagagcctctatgttctagtgtgtgcccctggctatcagttttctcatctataaaatggggctaataatacctctttcagagagccattatgaggattcaaatgaaattgtgtatgtaaagtgcctggcccggagggcccaccacttattcaagggtggacctaggggaagaaacgctgcaaactattgattggcatcagtgaagagccctagaaaatggaatgaaacagttttattttttactttttatttgaaattaaaaagttacaaatatagcacagagggtttctgtacaccttcacctagctttccctaatgttagcatcttgtataatttatcaaaatcattacattaacaacattgggcaatactgttactaaaatacagacttgattcagagttcaccagtttttctcttaatatccttccactattccaggatccaatccaggctctcacgtttcatttagctgtcattctccttaatcccctccaatctgtgatggttcctcagagcatccttgccgtccatgaccttgacatttgaaagggtactgatgggtgattttgtagaatgcccctcagtctgattgtccccccatgatgaaattgatgttatgcattttttggcaagaatactatatacatgaaatgtcttctctgtgcatcctatcggggcgtgtggtgatgttgctacgtcttattactggtgatgttaacttggtcacttgattaaggtggcacctactgggtttctccactgcagattactgtattttctttcccctttataattagtaaatctcttgggggagatactttgagacaattcgaacatgctgcttctcctcaaactttcacccattaattttagcatacatcagtgcgtcttgtctgcaataattattactgtggtgttctaatggtgtttttttatttcccttgttcatgtcacatttattaattggaactcttctgtaaggaagagctgccttcatttatttatttattcaggtacttatttataaccatgtggactcctggatttttattttattctaggagttataatttgatactctcatgatgtattttgttgctcaaattgttccagccttgggccttggggactctcttagttgtttcctctgtccttttggcgtgtgggggcagcatttaccagatcagccaaggcccagagcccagggcacacagtggaggtctgggcagctggagtttgctttaaggctgtgagagctgggaagtgagagtggaatcagaaaagatggtggtgctccacaccccttctccatgtagaatctgcctctgtaagacccactcaactgtgacatttcaccggaccaatcttatttccctgactcattctacagctgaggaaattaaggccccaggaagagaagggccttgctggaggccacagagcaagttgggtggaaggagagattggggagcagcatgggctggggctttgtccttgccatcccaggctgacaccccttcccccacacagtgcctgactgcagagtagcctgttccagaatctgggccgccaagggccgaggaaagtttgttccatcagcagaagcccaggaaatgggaggctcctggtgcaaagtttcttcaggaagccctggggctgttggctctgctccttctcctttttgcccagctgaaagggagggggtattctgttccaaatctccagctccagctcagtgggggcctctaatccccttctggctcagggacacggtcagccaggtctggtggaggtgctcccagagagcagatttctgcaggcctgggaacagggtgccatgaggccccaggcctatccatacaagggctgggaatgttagcagcagagtgcagaaaacaagcacagggttagagctgacaataagttctgtgagagtcaggggctatgttaacagagatccagtgtgcagaacgaggaaggtgacaagccgatacaatatacaggaccagcctgcagtaaattctccaacatctgagctcttccagtcctgactatctgcacaaatactaggctccaggctgtatggagacatatcacacccatggaaaatagaaaaatctccctgaaatcctggaagcacatacggaaagcattggttgtgaggtctgctcaacactttcttacctacagggagctttcctttctaacacacatttaatcctcactgtctccataaggcaggcaggacaggggttaggatcaccattttacagatgccgcagctaaagcctgaaagaggaaggggtgtggccttctccagggagtgcagtgattccagaaagaaccagaccttgcagtcttatgttctgggctttcccacaacagtagcctgtctttggggctggttctccgatatctgacataaccaacagccacgggtgagcagtccctgggttccgtaggggctttggaaagtcctctgagcattactagtgcttctgcaggggggactgtgagcatgggtggatcgggacagagcagaggccccccacaagagccatcagcgctgaccagctgaaggactgagcagagtgtgtgtgtgcaggtgtgtgtgtgcacatgaccgagggggtggcatgtgcttggcagggtctgcagagaggctgttggccaggtcttcactctcatctggctttggcttcatacttccttccctggcaggactggggaggccaaagcgcacagatggccatctggctggcactttaggacacggtccagtgcacacttgcagacttctcctcccccactccttctctgcttcggtggctctatcagctctgcaaaggagagacagggccaggtcagagatgcaccgtggagtggtctgcagggggctcagggcacagcacttctggcttcagaattttaaaagttcagtgctggggaggatgaggacagttcctcccaagcatcactgcagcaactctgtgtcttccagagttttgggggtggaggatacaagaaggggagggaggtaagaggttctggggcaagaggtgagagctggggatgggaactagctctggtcccagctcacatgcctacatactccgtaccccggccagatagccagattttgcaacaatgagtggacatcccagttaaattttcatttcagataaaccatgaaaattgtttaagatacgcatgtctcattgcaatattaggacatgctaaaaaattattggctctttaactgcaatgcagacttacctgggcaccctgtattttatctagcaatcttgtgccctgggtgtgtgggatggtggaccctctgtgggcctttgttgcctgccagcatcacgaagatgatgggtagggccagggacagtggaggacccaccttgtccgtggggatggattcttcctgtttcataccaggcccattgtccagtgatgggcagggcaggcacctcgagagtccatggagacgtgtcggggaatcagtgagtcagacctgctctcacagaacccccagtttcctctccccctcacggaatgggtcagcctgagtgaactgctggcactgttgcacgagaggaccagctcaggggctgtcctgggtcacgagggtgccctttcaaagggtcctgcactgtctgcctatttcaggacttctcctgcttgtcatctaaccctgttcttgacaactgcagaaggaggccagagaggggaataggattgctaaggccacacaacacgtagtgatgaagccagaagcagccctccacccacccaactccctgccctgtgtcctttgggaaaatacctgcctggccctgcacagtgttccctgagcagaggagggttatccttgggaccatgggggttctgcccaatgaagcctaatagagcttagagggggttgcccaaaatgtgttacatttcttgcagccaatctggccttgctaaccgcttaagcacaaacaattccatatgtccaacgggctgattagccacagagagatgggaaggggccggtcacaaataaggatctatattaacgaaagatccagtgatagaggtccagctgaagaaaattaaaaagattgtgttttcaaacactgccccccaacagaggaatttttctagctacaagtgagtgccttacaaatttcagacactaatgtattgacaaaaacaaacaaacaaaagttgaaatgcaggaaacctcctgggcccgatagaaatctcaatgaggtcctatctgcttgggtttgttaaaaaaatgcaactaacaataatatctgacacaaaattcttccatggtctggacgcctctcatccattgttctctggaaaaatgtctctttaagcatctgcacgttggcggtcgttagggggaaagagctcagcagagttttgtttatttatttatgtccttttgctgtattctgataaagcacaggcaggcaggcggcacagcatctggcttcttggaaaaatggctgcatggaggattgggggccctggctccagacacaggggcatgagtgggggtctcagagcacacagtgattccatcctctccagcaactggtgctgcagtgaaatctcccaggggtcccagcttcccctgcggacattccccagtccttctcggggcaccccctgctctctccttagttctgaggacgaggcagcctggctagtggaaagccatgagttttggagtctggcagactagggcttaagtgctgctttcactcctgattagctgggggaggcagagtgaggagccacatacctcctggcctccctgggaaacgagttgatccttcctgcctcgcatagccatcaaagggttcactagcacaggggacaggcactgacgactgtcacctcatttgcccagtgggatgaagccttcctcccctgacccagcatggattcagcctaaagatggtctctaggttgcaccagggaagctcctgcaggcacggacagtgcctctctccctccagacagaccctgtattaggaacccgagtgagaacataaaatttacttgctgagtgtcttccaatggcccaggaaaggctctaaagatcggggtgtttcattccagggaactgcctgggacataaatgtgaattactgcagttctgcagcgtccaacaatagcaccggtgtccacaatagaaacttcagccatggcggctttgcacactgtggctactttgctaaagacctcatgtaaatcagcatgccccccagctgccacagaaaaccccaagttcacttcccccaactccacactgctcagatgccggaaagttcttccttctgtggaacagatcatctgtctcctttagcttctgcacatttaccttgcttttgccccacagagactcccaggccaatctggcctcctgcttggggacaagtcacccaggggattaaagacagatctcaggccccacggaccagtcctgccctcagtctgcatccctgctccctctgtggtcttcgttggagggtctctgcctgcctcctgccctccccttgcctatctctggtctctctcctccaggactcagctccatgacaacaggcctctttccttggcaggaaacccgtgctgaagcctggccatgtccaagagtgccaatccaagagcaaaaacacaatccatttcatttctgtaaccccagcttcctgattcccagactatggtggagctgatgtattcttaagtaggaagacacatttatttcctctttaatcaaaccaggaaattacctggaagattcagagagtttgaatcacttgtgtaaggtcacacagcaactcagtagtccggccatcttgggaaaccaagactctgacctcctggactgggttccttcctcgagaacctctgtggtaaccagtttggctcttcaggctggggaggacctgtagctgacagcaatcgacgagattcagtgctatgtctattgtaagtgtctgtgttgagaaaacggaaaccacagaaaaaccatcagaccttcccagggctacagacacactgggcttctgtccacctgctcagagtccaacatggatctggaaatcagctcacctgaaggccctgcagcccagtgcaatgtgtctaagagcaggagaaggagaggaaaagcatgcacagctctcctggctcccccacccccagaggaagtccaaatcattcagaaaagcagataccagaatattctgaatttccagtaaggtttcccttcccaggaaacgtgtggtctggggaaggacagagacacctatgggtggggccgcgagcccctccggcttcacaggaggaacatttcctgagcaccatggcccctttcatttgtagcctgccacccccagtggaagtgcattaaaaacacacacacacacacacacacacacacacaatgcttcagaggtctgcctttgccaggaactctagaaataactcgctgagaaacatctccatctcatactcaccacctacagagaaaacggtccaatacgctggcagcttggcatggggagaggctcagagaggggaatgcaggagtgaggctgtgtggggggttggtgggggccccacggctcacaggccatagctgtcagggccctctgcacatctgggctcaaacaccggccctgccacctgctggcagtgtgactttaggagaggtgagcaccctctgggctttggggacctcatctgtaaatggggctgatcacgtatgaccttgtccacagaaaagttacagcatgccgggtaggaacaaagtgcagctggttctggagtccaggcaggataagggaaggtccctggatgagaaaggacaatgcaggatcagaggggccagtggtggcaggttcctctcatttcctcctactgtgaatgcattgtattctctgggacttttggtctgttatcaggagagaaggacaaatgatgtgttaagtctagctagcacccctattgtgaagatagggaaactgaggcccacagaatgtgggtgtcttcctgaagtcacagaaagggaagctgctgagctaggctcttgccacccatgctggactgctgccacccatgctggactctgcatgtcctagcaaaccccttggggagctgtgcacctctgagggcatgaagcctgggcacgtctgcaggaatccagaatgtgttgccacccgggcctgtcttctgcatttccctacaaaagtgaccagcactgaagtcaaatggacagctagagaggggaaagggacccagctctgtccctttccaggttgtggcatggtgcatggggcttgactctgtgggcatcatctgcctatctgtgaaatgaggacatgactcttacctcctaggaccactggtgagcattagtcattcatcaaacaactactgatgggtattgattgcctaagttccagccactattcctggaactggacaacatcagagagctaggcaggggctctgtgcacacgcttctccctctctagcgaggcaggcagccatgtgacaagcaaaagagaaacacgcaggatcatttcacattgagataataataaacagtgcagtgtgagggcaagtgaatggtgtgcgttgggctgggagctgtttgaggatgagagggaggcagggggcgacagcacctgccaggttgtagaaaccacaagtgccaagatcttgagtgtggtgggagtggggaggggatgccacggggaagtagcagggcctgctgtgaggctgagccgggcacaccagtgctggatgctccatcacgttcgggctggatgccatgcaggagtctgggggcagccttcacagatgccccacactttgtgggcccaggcaggaatctgggcagcacaggctgatgtgtgggctctctcggggcacaggtgcctgacccaggcctggtgggaaggtggacgtcgatgtcacagagtgtctggaaggtttccatctgcctctggtgggctgacagcagacagggtgaagccaaaggacagggaatgtaaattgctgaaatcacctacccctggagccttcccagataacataggcattctgaggagaggttgtggtagagacacagaacaggaagagagaaacctacagagcagactgcttgtttggatccacagttccaggtgtgctctgcagatcaccagttccctagtctattagtccgttctcgaattgttatgaagaaatgcccaagactgggtaatttataaaggaaagaggttcttattttattttatttttgagatggagtcttgctctgtcgcccaggctggagtgcaatgaagtgattttggctcactgcaaccttcacctcctaggttcaagcgattgtcctgcctcagcctcctgaatagctgggattacaggtgcaaccatgcccagctaatttttgtatttttttttcttttttttttttttttagcagagacgggtttttgccatgttggccaggctggctcgaactcctgacctcaggtgacccacctgcctcggcctcccaatgtactgggattacaggcgtgagccaccgtgcctggccagaaaataggtttaattggctcttggttctgcaggctgtacagggagcagactggcttctttttccggggaggcctcaggaaacttccaattacggtagaagacaaagggggtgctggcacttcacctggctagagcaggaggaagagagggggaggtgccacacacttttaaacagcgagatcttgtgagaactcacgatcacaacacagtaccaaggggaaaatctgcccccgtgatccatccacctctccctaggccccaccttcagcagtggggattacaattcaacatgagatatgcatggggacacagatccaaaccatatcactgagtttagtggcattcctaatgcattcccctcctttctttataagagtttattcaggtatacactcttcatgggcttcaggtgaggcaggccccagtcccagttcctgccccaagactgatcaaggaggaaccatgatcagtttcagctagaagttctccaatttcctatgtttatggggcccttagtctcagcaatttttctcactgtgcccctaagctaaaagaaatatctaacccttctgctgggttaggcccagacagcttagtaagtatttaggccctaacaacttagccaatcgcaactagctaattgtaaagacactatacgtgaactgaaagaaaaaaggtatacttttaattaatatattctttttttaattttagaaacttgttaaaaaacttttttgtaggcaagtggaacttaatttggtaaaaaaatatatgtttttatggtatataacatgatattttgatatatgtgtacattgtggagttgctgagtcaagttaaataacacattcattattcatatacttattttcttgtggtgagaacacttaaatatactcttagaaactttcgagtatataatacgttgttatgaactacgtcaccatgttgtacaacagatctagtttattctactataatcacttactagtggaatggatgcacctgttgggcactgcacaacttctcacactgtgtgtttggattggacaccagcacccccatttcacattccacactgattttcattccatacttgttttatttcagcaatcactaaaacttctcaaagatacgatatcatcaaatgtctgtagcatgattaatgttgaaaccatgaataaactgagctaaaaagtagttcaagtgggctgggtgcagtggctcatgcctgtaatcccagcactttggaaggccaaggtgagcagatcacgaggtcaggaggttgagaccatcctggccaatatggtgaaacccccgtctctactaaaatacaaaaaaataagctgggcatggtggtacgtacctgtagtcccagctacttgggaggctgagggaagggaattgcttgaatccgggaggtggagattgcagtgagccgagatcataccactgcactccagcctggcgacagagcgagactgtctcaaaaaacatacatatataaaaagaaagtagttcaagtggtgtccaacagatgtccagcattactgagttttccttgaaagcttaaaatatcccctggcacccctgaatttggtgtggcaatctggggtgcctcatcccttagtttgggatagagtggacttgaagccgtaaatcatctgtttaggtaagagactgtgatgcaattccggctgatgaaatgtggagagaagtcttttgagagattcctagaaaagggtctcctcaccctatcaaagctgtctgggaggatgccttctgctgggggctgttgcagagtctgcgtaggaacctggacccgcagctgccctcttggacccagaggaccactgtccccaggagaagacactggatggtgaaggggatggaggggctgtggctttggtggcattgtttggctgctgaagcctggaaatacccatctctggacttgctattttgtaagctaatgctgtcctggaaaatgtagcctatttagagctggatttcctgctcactagcagcaaaaaggacccttcctgatacactgcaaagaatgtttgggaacaccacactttctattctccattagggtcacctattaaagtctctgagaaatcccacaatcctctgtttactttggttcagtacagtttgccaaatttacttaactgagaaaaccttttttttctgtagaacctaattatacctcacagaacatttgtgtgccaaaaaccacatttttttttttttttttttgagatagagtctcactctgtcacccaggctggagtacactggtgcgatctcagctcactgcaacctccacttcctgggttcaagtgattctcttgcctcagcctcctgagtagctgggactacaggcacgtgccaccacacccagctaagttttgagtttttagtagagactgggtttcaccatcttggccaggctggtcttgaactcctgacctcgtgatctgccctcctcggcctccccaaagtgctgggattacaagtgtgagcaactgcacctggccgaaaaacacagttttgaaaggacgccttagatccctcctcacggcccctcatcccctacccaccccagaagcccgtacacacagacgcccacctcagcagagtgccagggcccacatatgtttctattcaatggggaagactaaccaaagccagatgtacctgggcagcccacaggcagaggaagcaatgatgtcatgttccagccacgcagggattagctgccagaaagcccccatggaggagtggggcctggctgctaatggattcagcaggagcccccctgtaggctttacacgaccaaagtgcatgactgctgtgtgtgcatgatggccgtgcctgtgaccactgtgtccctgactgctgtgtgtgtgatcactgtgtctatgaccaccgtgtccctgaccactatgtccctgactgctgtgttggtgactgctgtgcccatgaccactgtgtccatgactgctatgtctgtgactactgtgtccatgaccactgtgtgtctgattgctgtgtccatgaccactctgtgaccactatgcccgtgactgctgtgtccttgaccactgtgtctgtgaccgccgtgtctgtgaccgctgtgcccatgactgctgtgtctgtggcctctgtgtttgtggtctctgtgtccctgaccactgcgtctatgacactgtgcctgtgactgtgtgtccagtgccaccgtgtgtgtgggattgctgtgttcaagagcactgtgtacttttgggctcagtccctctgtagctcctaggacggggccctactgttgctgttgtcagtcctgccacccaacaaggcagtactctgtgtatctttccttggctcctggtcatgcctcctctcatcccccattcttggcctccctgacccaggaggaggacagagctctgttgaccactttctgcatgatttaggccatccttctctactttggagcccagagagtatccgccctgtgattttccaaaagtgtcccctggcgaccattggtttctgaagaggaactgtaggttatgtgtcggggtgaggagggtcctagctgctgcccttgattcaaccaggacagctttctgctcatcctttttatccactgggttcccacagagtatttcattggaagaacagtttttgtggcaggaaaaaatatttccaaagtaatgatattgaccagtattgcgtttttgcaggaaggactggggcctcctctctatgctgtggaatccctggagatttgtgggagagccagatggggtcagggcagaggaacggaggagaccgcctgcgaaggcaggagtttgttctccctgttgactttgcctgccatgacccaggagaaaaagccctttgaaaccatcagagagcagtcaggcagacccacaaggcatgcttctcaaactctgggtcactggtgaggaagcaggaggcaggcagagaagtacagccttggaggcggaatgcattttattttctcagccaagatttagaggctgatgctgacaccccgaccaggccaggcacctttgcacgagagctcagctcagctctggaccctcagaactgccgggctcagtggtgtgcatttggcaatgggagcccggcaaggcatgtgcagggataactgcaccatcaggcacagtgggcacggtgcccactgcccagaatacttgcaggtactctaaaaaatgtttttatttcttttaaaatcagaagaaaaaaaagctttcaggttgaagaaaatctttcaatatatcatatttatgtattcgtctttacaacaatgcagttttaaaataagaattacatatttatgggggaaggggtccattaagggaaaaatgcccgccgaagtgctgatggagttataatgtgtccctaagtaaatgacagtgaatttcagaccttgtgttagcttgggctgctgtaataataccacagactgggtggcttaaatgacagaaatttattttcttgcagttctggaggctggaagtccaagatcaaggagttggcagggctgactttttccaaggcctctctccttggctcccaggtggctgtgttccccctgcatctttccatcatcttctctctttttagatggagtttcactctttttgcccaggctggagtgcgatggtgcgatcttggctcactgcatcctcaatctcctgggttcaagtgattctcctgcctcattctcctgagtagctgggattatagacgtgcaccaccacacccagctaattttatatttttgtagagatggggtttcaccatgttggccaggctggtctcaaactcttgacctcaggtgatccacctgcctcggcctcccaaagtggtgggattacaggtgtgagacaccatgcgcagcccctggtctccactttttatactgatgccaatcatactgaattagggctcaccctaatggcatcatcttgacttcatgaattctttaaagtctctatgtccaaatatagtactgagcattagggctttaacatatgaatttacggggacacagttcagcccataacaaatcttcttgcataaattcatgctctttctttgcaactgcctttcccttctcatctctttttttcccagagaaagagaaagaccctatctaaaatgctttctgcttcagagagcatcagaagggaagcttgcccaggctccctggttctttcttttgggctgtgggtcaaatgctgtccagtgctgacctggacaagttgaggataccagaaggaatccaaggcgccactagtgctgtgggtggaccctggtcatccccctgcctctggatattagaactcagtttagctacattcgagatgtaattcaaggggtcactggggaatggttatatgtgatgcccaagtgtgtggcttcatggtcccccaaagaccaggtgccagggcaacccttccccacctgctccagcactatccaccccatcccagtactgtcaattatatggggtcaatggtgtggcaggaggatggttcttggtattaaaacggatccatttccttagggttgaaaacgtagaggatccaagcagatcctagcctcctgaatgccaggaattcttgatgttttattaggattttgtcaagaaagggggagtgagagctcctcactgttcctgattcaatgaaactggagagcctgttctgctgcccttgaaaattcaatgttactttcaagtgtggaatgtcctgtaatttttgtgaaattggcttttattttaaatgagtcctactgagggtaatccaaacatgaagacgagaaggaggagaaggagaagggaggaggaggagggtgaagaggaagagttccagtggcatgagaaagcagggctgagtctgggagttggattccctcttgtcctgccctgtgatgtggtggcattaccttctctggagtctccaatcctaagacactagcctgaacatgtctcagcaatttttcccccatggatttgcccatataccttgatggatcttacgatatttgccataaaattcagggtcaatggtcatcaccattctagagcgagtacccatccaacctggagcaggatgggcagagccagggcatggggctgaggcctggtactcaacctggggagcagaggatgcagaaggaaaggagccgatgggctccaggcaatctcctctctccacctggtctcccaccagagggacagagtgtggcctgggaggctggaggtctgggtttggcccctccgaagagacccatttcatatgtggctttgggctagcctctctgttcttaggctccccatctcctaaatgagggagttggaccagatgagttcatcaaagccactgggtaccagccaccaggtgccagcctcaggtgctgaagatgcacaaagacacaaagacaagcccatagccctcccggagccaggtagcctgctacaagccaggcttgttcacttgctcatttttcctgcctgaaatacatttatttttttctcatgatgaaagctactcatgcttattatttaaaatatatatacagaaaacatggccaaggaaaacaaagacagaaaaatgatccccataaatctcacccactcagagacaaccatgtttagtgcttggattttcttccagaccatttcctatgactagggacactcatacttaaatataggaacaaaacaggatcatagtgcttattttttctgagtcctcacgatcattctatgagtcagttagtagtagtatttttactttatatatgcagaaacagagactcaaagaggctgagtaactttctcaaggtgacaggactgtgactcaatgccaaattcagctgacgtcaagtcgaaagctctttctcaacacccttgtccatgagggagccaggtaggtaaatgacggattgttccagcattaaccaaacctcacagaagctggagacccatgcacttgttttaggatagctgagtaaaggtcacaagcaagtcagcctttgaacggtgttcttggaaacaaggggggctttgtcaggtggagaagcagcaaggaaggtgcttcaggcagatggaagaaacaaacaagtcaaaagagtgaaggtcaatcaagttcatggctccctcagtacaagaaagcagccagggaaattggatatgcatagacaggagtgtgtgtgtgtgtgtgtgtgtgtgtgtgtgtgtgtcaggggaggcaaggggatgtggcaggaggtgagcttgctggagttaggctgaggaaggccataaaatatgctgagcagttcaagctctcttcttaaggtgatgagagctattaagggttcttgatgggatatgaatggatcttttagggggacactctggaggccctgtggagggcggattggggtaaggggagtcaatcatctgattctttgatcctctttccaacctcaattagcatccccaggaaagggaggcagaaagagtggggagtgaggtcccatgagtcttgggaagatggctggatgcccaaatactccatcttataaaaggctcacctcatgggctgatgaggagggaaatgaagccagaggtgtgtggtggaactgtgaatgagcccaccccttagagggaggaagaggggaatgagggactgatttaatggtattgattcctgctgtgtcttatttctgaaactctgctcggctgtctgtgccaacatctgtttgttccatctccagcatgaggcagggcccctttctttccaggactgggttggcattgcttaagtttgcacttgggtggtttttttctgggaggattgatgtcctgcactccaatcagctgggtcaggcatgcactccaccttctacatagtcccatagacatcagaaaaggttcggggtggagcagacataggggctcacatgggtcaggaacctgggctgccaagggagcctctgcacaaagggccagagctgtgcaggtgacgggtgtgtgcaggtgcgggactggagtcatgaataggtgacaggtggggacaaacagctgctggtgagtataggttgagtagctggatgaaaaaatgaatgggggagtgaggctaggttatactgtggcaaaaccaaatggcaaagggttagtttgttcttgtgctgactgtcctttgggacttgggtgccaggttaggtcgtctgagaaacaggctcccacatgggagtagctatggctttattaggggagatgcctgtgaaggataaagggtgggggagcaggagaggcagggggaagctttagccacagtgcaggtctgacacctgggaaaggagagagaaggaaagacggggaaggaagagcctgggattgcagcatggttctgcggagtcctgggccaggctgatggcaagtccctaaaccaaagttgctcattagcagaatcccacatcaagcaggactgagagttctaatattcaagtcatggataccagccatttgcatggaacagccaagggaagccagtgtggcctgggaggaggacagagggagatccacagggaatagctggtggccgtgggtcagctctgcctagagggaggctctttggaaggagcctctgagagggacgcctctatggctgctgtggttggctgggaactcggccgcaggcactcctcattcgggaatccaggctttttttagagaacccactgtctagaattttgctggtcactatgacagaggaaaaagataacctggaggatctcacactgttaattaaaggctctagtccagaagagatgtgtgtcaactttactggtgaccattggccagatctgatcatgtgaccccaggatccaggaagtgagagtccaggaaggggtccaggaagtaaaatcagccaccgcatagtaggaggagagctgaaaatacttgaacagtgctaatgcctaccacagtatatgaaaaggaaaatgaatgaatgacgggaaaaagagatggatcaatggaatgactgaaagaatggagaagataatgaaggaagagagaatcaaggggtgaaggagtaaattaaggggtaagtaagcaagtgaataaatgaatgaataaagaagtaatgaaggatgagtgtggcctgatggatgaagcagaatgcataggatgtggatggatgaatagtgagagatgagaaaggatgagctaaggagagaggccattgagcctcctttgctttggaagggtaacaagcaaagcactccccttctccccactgccacctccagccagatgcagctacaatccaataattgcaccaaccagcagtccctgaatggttactgcaaaggtgtctctctagaggccactggggctgcaacacagggccaagaagggacagcctttccttccctctgacagcacggccctgtattgaacagctttgtgaacatattctgggactactaacgtctgtgcctgcctcttgcagagagggcttgagggctgccagcacattgtgatcctcttggaagcagcagagaacctccccccaacttaaagcccacctcgcttttccagtgtgcccaaatccacctgatgagaaccctctttcgctttaagctttggctgttaagaagtcttcttttaaaagaaggaatcctctaaataaacccactcgcaattattgaagagctattgtactggtcacagtggaggccgctgggatgacagttacaaaaggaccatgggcaagctccttccctctttagcctcagtttcctcatttattaaagtggaaggggttctgatagatcctgttttatacaagactgagcacaagatactgggtgatgaatgcagttccttggtttgacggttacagaggagctgagttgcactccctttgtcctcatagatgggaagtggtcctgcccttgaggtctcaaggctgacctgttggtgagtggaaccagatgatcaggtctagtctagattaaaggactagtgacaataacttggtttgtggttgctcccaattcaatttgctattgaacagcaaacaagcagggctgcaagccagtgaatatgggtctctgtacatcttgactttcaaagtgtatctgaagttcaggactcaaccactcctgcacaaagtgggagatccgccaggccagaaagagctgggtgctgcagactcaacgctgttttctgtaaactttcagttgaagtgtaatatacatacagaagaggtcatgaatagtaagtgtacagtttgatggaatttcccaaagggaatacagttgtgtgaccagtactgtaatcaagaaacagaacatgtccagcattccacagacctcgggatgcctttgcatctggcttctctcagtattaagttgtgagacgtcgccacactgttgagtgtagctgtgctctttctcctcattgttgtgtagtattccattgcgcatcactgcctcttatgccttagactgcatcagcattcaaggttctacctatcacctgtgcagcaatttcttgctgccctgtagtgacgagcttctgcattcaaatttctgttgcattatcaagctcacagttggcctgagcaggatctgtcactgtcgcaaaaactatcagcggaaggaggcagcagccagatccccggccttgatctgaaaccaagtcagcaacacccagtggagatagggagtgaagcagagggttagggggaggatgtgctgccctcacgcctggaacaagcccatgtgggctctaccaccaccacaaaggcgggtgattagggctcattagagtaactgtgatgatgcaggagagatatcacctgggtgtcagatttctggccacctggcaaagaaaggtgtgtgcaggagagaataagcagggccaggggcagacaggctcttacctgcaggcaatagatactatggccttgagtgtgcagatggcagcaaggacactgaggcagtcagatggttaggacttgtgcatggataggatgggaaggtgaagagaaggagcaggaaggggaatggctgaggtgcagccatccacaaaaccaggggctcctggatgggggtcagagcagactgtgggcttctgaggacagggccctctctccttcttccctgtagccccctgtgcctggcacagggcaagcccacaagtggcactaattaaagtgtgagccatccctcttggtcaggatatcccatgtcgggatctgcaggtgagacagggaccatatccctcctgcctccccacctgatcaggcttcatcaggtctccagggctctaccagctgtcaggcagctgcagggatttggctgctgctctgcagggcccagggaaggaggcagagttgagtccattagctcggtgctgttctccagggagcacgcagagggattatctggctgctttgccgcctcctgacttcccaggaccacccctttgggactcgatccaaggaagtgagcgatcccctcattaggcataaggagtcagtaatcctgccactcctcctccgtgagcctcctgtgcaccgagtccagcctcaggaggaagcaatgggctaggcgggccaggcctggcttctagcctgggctctgcttttcactcagagtgaggcctggggcactccccatcccttctgggctgtctttccccatccgcaaaacgagtacccttttgtctgaaagcccttctagctctggtgtcctccaatgtgtgaccagaggcagacccagctccatctctgagtgggcctgggggactcactccccccatctgtttactgtttcctcttcttccctgatgcccagcatggtggatggggagtataatgaccctgacttgttctcagtggaaaatgatggccaggagaaatgtgaagtgttagttaccacctgccaaggacaaactgaaatgactagtggtggcccgttttgggagggtagggggaagggtaggagccagaggcattccaaggagaagggagagacagaaaggggtataataaaaacaagagccccacatattgagggcttgcttaatctataccagcacgttactaagagctttatgttatatggcatctcacttaattcttaatatcaaggacaaagccccaaagccccaagcctcagggactcagagggtgaagttagtttccagtgcaaaatgaggtagaagatgatggagagaatactccatggtcccagagggtctccagcagatttgttctggatgagagtattttagacagtcatgttaacatgtcctgaaactgcactaggttcagtggctgagaatgttgatcgaaagctcaggtgtgcaagaaaaatggaattttctcacttttcctatacaattcaatttctgtttctggtccccattccaccaaggtgctagacccaggaccctgtacatgaatgacctctccttgctcagatatgtgagttctgggagctatacaagtgtaggggtgggtggggtgctgggtccttgtgtgtcctggtttccacaggcatgtccttcaggcacctggccctcaggtgtgatcctgtaggtgatgcagggcactcctcacacttctgtaagtcccctgatacctaggagcattctctgcccctccacaccaggcttggccacccacacagtccttctgctgccttagctacccactggggcatgaaatgctgcgaagccgcctgagctgccccttctgcctagaaatatcctgcatctccttttccagaactttgtctcctctctagctctttccgggctgtaggggtatgggcctttcccttattgatttcaccaatctatttgggagtcatggggccttcctggagagggtgtgcagggctcgtctctcggggacacactgacaactccatttatatcccttcttccaattcccttgcactgatcatcctcagggaaacccagacatgggagctgggacacttgctgttactcactgtgtatcctccacatcctttatcagagaccagcagtcccagtagggatggctttctggaaagacatgtctagtttctctgcttcctgcagctccatcccttcccccaggtagttagacagacctccgggctctttaggaatatgggccttggtgagaaagggaggacctacctataggaatatgggccttggtgagaaagggaggacctagctaaaattctgtgtgtacaaagacagaggcagaggcttcaggggaagagccatgccaggcccagagatcaaggaacagagccaaggtgtcctccaggtctccatcccagggttgtgggacacccccagcagggcagcctgccaggccagccctcctagtgaaggctcagacatcctcccaccacagctctgatctatccattccagcaggctccacaaacagaaggagctccctagaaagccaccaagacccctgccatggagccctccaatcagccttgctcctgccaaatctgttactaatttaagcaagactctagggggaatatggaagacccaaatgtatgcgctgtgggtcaccaaaaggaattctgccatgagacaggattcggaaccacagtgttttggcttcctcttgtgccaggcttaggggagaagtagtttgtccatatcacccactgaaataagaaagtaggacctcctctgtctgcccccaaagcccacaagattcccaatatacctcattgtctgggaggctttgtgtggctactaaagtctgtcttccccctggagaagttcactgcatccctcccattttggagaagggaagagacacgcagtgggttaatggggagtgtgtttaaatcacagagggtgagctcgtgtcttctttgtatgtcagcacacaatctgccatctccccaagtctgttctgcatgagtgagtgagagtgaccccagtcactgctgtcatcagcaacatacaggtcatggtgccaaggaaaaggccaatcagaccagatgtaagacctggatccacccctacctgcaccccaaggaccggccaggggagggtggatgtgctgcacaccagagcctcatggagcttttcaaaagtgggtccctgagacaccacccaccacgcctggggacgattaatagatgttatgggaacaaaggattctgtggtcagagagcctgggaaatgctgagtcaaaggaggtcgagcatgtttcattattgtaggaatctttagctgtaaatatgctgtatcttgtttactctcccagaaggctgtagaatccaggatcctctaacttaatttggtcgtaactggccctttctctgaagtatggcgagcatcacttggcttcctcaacacccttctgggaagcaaggctctgatgctcattagaaaataatccctgggaaggatgaacagacaaataatgctgggtctgtgggggtccagggaggcagcttatggcaagggcgtgtgtgtcctgggctttaagaaaggatgaggctttggaggtagggacctggggggagaaggatcttgcagaaaagccagtgccggcattggaggcatttgagggtagtgggtgtgaacagcacatggtgtgcaatttggctgtgtacttaagagggagaacaggtgcatcaggttggaaaacgaggctagatttgttcttataggttagggtgttatcacagcagaatgcatggtctctgcaaagggtcccctatttacagacacctcatcactgacttcccgtggcccactgacttcagaaatgaggatggaagcctggcagagaaagaacctctttgcaaaacatcaggctctgggcctcttctttgtagtgggcagtttccttctgacctctcctttctgacaggagagtggcacctttctattctcttcaccatcgtaagagcccagagagcctctgctttgttcaaaagccagaagagaagaaaaggaatggtatatcttccagatcctggaaaacctagatgcgtgtagccaggaaagcaaaactgttcattaaaaccaacctgggatcttgccaagtgggagaaagagacttggggccaggagcctcggcaatgggaaggagcggagtggtagtgggttatttatactccacttctggcactgtctgcctgtgttctttcagctagaggaaatgctcccatccctcagacagacatctgatcattataatttcgtgtttgaagacagttttagcctcctgcagacacacataaaatctgcatccgccgcccaggatgggggacataaaagttctttaagagggtggtagaccttcgcgggatagaatccaggctgtctccagctgggcactggggcaggcttctgcagctctgctcacacaccacctgtccactctcaccttctccctctgcccactcggcagaatctacccatccttggaggcccacccagacgcctctcttgcaggggccctcgctgagtcttctctccctgactgtcttggtactttctctccccccagagttgatttagttcacttgatgttatgctacgctgcctcagtccctagctgcctcttgtatacataaccatatattgaatgggctgaactcgacggggcacgaacaggaaatggctttatttctctcccttggatgctttcaaacatgcctggctagatcttccccaccctcctgatggcattgcaggcatgtaccagagcctccctgtcacatgcagggatagaaagtattttcctctcagatattaaacaggtcctatccggcccacgcacagcctccacggacatccagttcaaagtttctctctcccggcagcttggtgggcagaggcctgcggtggcccagggatgggttgtggtcagttctttcttactcttcctttatgtcctccccaaaaacagatgctaaagtcctaacccccagggactcagagtatgaccttatttggaaatagtctttacagaagtgatccaattaaaatgaggctctaatccaatatgatgtttccttataaaaagggaaaatttgggcagggcgaggtggctcacacctataatcccagcactttgggaggctgagacaggtggatcacgaggtcaggagttcaagaccagcctggccaacatggtgaaaccccatctctactaacagtacaaaaattagccaggtgtggtggaacgtgcctataaccccagctactcaggaggctgaggcaggagaatcgcttgaacctgggaggagcaggttgcagtgagtgaagatcatgccactgcactccagcctgggctacagagtgagacttcatctcaaaaacaaaaaacaaaaaaacaacaaaaaaatgggggggtggatggtggggaatttggacagggagaccgacaagcagagagggagacaacttggagatgagtggggagcagccagctgtgggactggagcacgcatctctgagccgggagattgaatgggccagaaagatcatcccctgggcccgttaggggaagcgcggccctgcccacaccctgacttaggacttctggtctctagaactgtgagccaacaaattcaattgtcttaagcctctgagtctgtagggtttgttcggcagctctaggaaatgaatgcatccaccttcgtcctgctttccccggggccaggcaaagtgaggagctggagaaaagcagaccctctctttttggatggccactgctgccacctcagttcaaggagaggctttcaaagtctctgtcaaggcaggtaccccagtgctgggtgttctgtggaccctcctctgtgacccccggggtgggtccccatcacagtgccagaaactgctcgccttctatggcctcttttcagccctggagaagctcacattctctttccagggcaaaggcgggcctgcaggctgctgcagctgcccttggcctcaccccactccggccagcctcctgtcctgagttctaaggtgggacaggttcagttcctactctaagtccccacccccttcccccacaacccaggggacatgtgataaactcttctggaaatttctgtgcctcatggtgggcttggagtttctgcagtgcaatgggcctccaactggggaaggaagcatgagtcttctctctgtacaggcaccccaatctctgcaagaggttctctggagcccctgctagtagcttacaggagtgcacggagcagccgagtcacagtattttacgtaaagtttcctccacattcacatcaattctctttcttctgcttaagcagggtggatgtggactgaggaggtgaggagcaggcagtgtagaagcctcttaacaaatccaggaggaaggaacctggtagctataccccttggatggtaggggcatttgacacccattgtcctgggctttggggtttcagtggaaggagtcccactcctatccagtcccttaggagaacaagtcctagatgtaagagattggaaactccctgagcacaaggggcatgggctctgttttcctctcccttcacgtacagctactaggccagagagagcccaggctctggagtcctgtggacccaagttcaagttcctgctcagttacttacccagctgtgcatctcagggaagtgacccagccttttccagtctctttcctctgccggcttttacgtgggagtggaaggcaaggaaaaaagtgcctgctgcagagtcaggtccagggacacaccagcccttgcccccacagcattttggggctggccccatcctctgaggatgctggaagcatgcgggtgacactctggtgaaggctgtgggtttctcctccagcgaagtttgttataggattcaggttaagaatctctgtctgaactctcagtggcttatcaccgaattacacgaaattgtttggtaaaggaacagcagaaagagagccaaaagatattggtagctgattggggtccctgagtcatctgagatggtgactaagtaacccagcactttgaaaagcctggacctaaattcccaggggaattttttccccacatgcccttcccacaacatactgggctggatccaatcccacctagtactgttcaaatgcaatccctcttgtgcattgagcagtgtgctgtggcgcagtctcagtgattcctaaagttgactaaaacatgccttctaaagggaaagctatcattgcagacccccagtgttgataagaattattttgatcatattgttacttaaatatatacaaacataaaagtaagtataaatctcttatgcttttagctcttacacagctgtaaaaccaaaacacaattacaaattaaatgcaaataaagctacaaaaccattaaaattcaaattaatggcattaatttaatgtgacagatgatgttttgctgaaagtaaaacaaccaacgttgggtttaataatagaaggatacattcccatttaagttccgcttgttatcaactagatcattttgatgtttggacatgctagaccatcattagagttattatcaatattattatatttttcatgtattacaatgaacacacttctaaacacagacctagaattttgatgaagcgatcaacttaatagagcacttcaaaatataataatttaaaatatatagaaatatgtaccatttagtaagactatataccatttaccatttccagctgctagtgttgtcttgcaagttgttgcaaaccaaggtggcattcactcaggcacctgcttgcaaaacagtgactacaattctaccagcttcaatgcagagcagcttatttgtggcatgtctgtgtcccctgttctgtttgatgactcaatcctccctccacttatctctgtttgaacaattgctaaacctttgtttgtacagcagtccatgaagtcatttggccttcattttgcaaaaacatgatagtaaacccaaatgcaaatgtgaactctgcattcctgaagcattagttggtgataatatgatcatccacacacaaccccaatagggtctcactgatatttttcaatttttaaaatgaaaatatcagaataaaaaaagactctcatatcactcaagggcccctgacagtacatctgtggatcccactttgaaatccctggtgcagtgaaaggaggtctggcctgggaacccaagactcgagttttcgttctaagtccctcattgacccactgtgttctgtggaccaatttccccctttctagacttcatctgctcatgatcagtaattgtcttgcattttggtcatcatcacatttatctcacctgatccctccctgaggtcggtatgactgtcctcaatgacagatgggggaaattgagacccaggtacacatctggtgagtgaggggatggggttaggaggcagagctggctgactccaaaggcaccacatggcggtgattcacaaaactgaggcgcccccagagccctgccagatctctcaggctgccctggagagcttcagtctctgatgacccatgtcttgggacccatgcctcctctcagccacacatacacatatggtcccaggcacagccctggagaaagtgggagaacagccttgattcatcctcatcatcctccgatgaccccaccagcccagtgttcagctctgagacaacatccaccaccccagtgacaggggaaatttccccagctaaatatcagacacaggtcctgacaactgaagttttctgatgggtaaattcatgtttgtttatttattttgatgaaaagacaggtctaagtctataattcaaatcccattttatacacatgcatatgtatgtatgtatgcatgcacacatatataaacatatatacatacatgtgtgtatatacatgtgtatgtgtatagactttccttggtgaaagagaatgaaatttgcttgaattggagctgtgctggacacaagatttgtggttgcctttttgagctgaggtatagctccactagggaagagtcttcagagagcagctgcctccctgggtcctcaatcactaacctctctaatctttggtgccagtgagactgtagcttgggttcctccccttggaaaccagaaagactcctcatcttatctcagaaggccctgcaggcaccatcactcttggaatcctccctctttcagaattgatgtgtgtgtgtctgcagccttgacatgtagagtgatgtccagggctttctggaattctggttccagtgggaaattcaacttggttctaggaaatgatgccattggattcattctattcacaggcaaggaagcaatctttagggaggacctgctttaacaacccatctttcctccttatggatcttaagtttttaaaagattatttcttctagagggagttaagtgataatgaactcattctttcatttttatgaaacaaagacatttatacttgaccatcagagattctaattggcatgtggctcatgcttatgagacctgcagagttgatagaatcgcagctaaaacaaagacatttgacattttagttattcatgcagccttgctcagggcacatgtacaatgatcattaagctgtttgaaatagtgatattccagcacttgtgaaaagaatatactagtgcccaccaatccaacattgtgtcccaggagaactcaggaacaggtgggtgaatgcaattccagctacacttgttcgactgcaggaaaaccctacaggttgctgggctgcagtgggggaggtaggtctttgctcttgaggggttcctgatctgtgagccaagccattttttaaactgactgctctttgtagcgggtggataagaggcaaggactaaacagggctaccttaagataacactctaaggatgtcatcatgattcttagggactgtgcatcgcaccttattcagtactcaaagcccaggtatttgccctgcccaggactgctcatggatcataccagttgttcctggggcagagtgatgaggatcttatatcactgggcatagggtcttctgggctgggccttgaaggacagaagcctgctttactctccgctttttgacctagcctccacttcctcactctttgtctgttctgcaagtttgtactcacttctcatctggagcttgccatggctcctgggatcccagcttcctgctctgctgaggaccatggtcggtgttcccccagcagcttccttttaagcagtccctggcccaagctacatgctcagtgaatatccctgcattgactcactgaggccactccggcccagctgcctattgctcctacgctatggccctttagtctcaatggaaattgaaatctggagtgttgggctggccagttatcctctgtccagtgagggccctgtctaactttcttgtctttatttcttttctcagcacaggtttgggctatcacctgagaacattcaggagacagtacaggttcccagatgcaacgactcactcagatttgtcttaacagacccttctactggcaatctcaggtggagcaaaaaggagcgatcattagaaacaaattcattgtggtctcttgattctggccagctactctgcaaagtctggcctcctgcacctcttgggatgaggtggggcctcttgtcaagacaaaagggagcaagggcccctgtagggggaagaagggctgcccaggcctggtgtcagttgttcctggggcagagtgacagggacctcttatcactggccacccagtgtctatggaccttggataccatggcccccaaggtttaaaaaataatggaaaaagccaagatggcaggatttaagcatctcaacatggtcattgccactggagcctctgggctgcatgggcctctggcaggaggagggggtcagggccaggaatcaattataggcaaaggctggctcccttggggctggtgccagggagaaagccagctgcctcatcgcagtgtccaggagaatttatgagttggatcttgggggtgagtggtgaaggttgagctctccaggaagcagactctcagaaggagtttatgaagcaggacgcttaagaggaatgccttgagacaaacacctgtgggaaacggggagggaggcaggatggggcaggggagaggtggagctgtgatgtggcttggctgacaccacagagttgttggaactcagctagctcctcagcgtcatctcatgtggggctctggcagccaggcctctgcatcttacctcctcagtcagaggctactggaacctgaccatcctttaaggactctagaatcaccctgactcctctggttctctcaaagcccacacccaattcttcaccaatccctgtggcctgcatcttacaaacagatccagcctccaagcgtaggtgtcttccttcctccacggcattgtccacgcttccaccacctctcccagagccactgcaacagcctcctgcctcacctccctgcttccactcttggccctctggttgtttctttaccctgaaccacagcatcattttagaatagacatcagaacttgccattcctccacccttactcccatgacttccctgactcacacaggccaagagtcaacgcctcgccactctctcccagctcagccccctccctcctgttcttgggacatgccaggcttgctcccggctcaagatgggtgtacttgcccttttacctgcccactgggctttccccaagacagctacagagcgcatttcctccctgccttcagatccctgttcaaataccatttcctcccagggtccttccctggtcatgctatatgaagttgcaaacccggcccaccccatgatattccctttgaagtttgatgtgtctttggggcaccaaatgtatacaagaatctggagttcaaaagagagctccagactggtgaaaaagatttctgtgtcctggtaatacagatgacattcacacagtgaggatggagaggatcccctagggctgtcttgtccaatctagaagccaccagccacacttggctactgagcactggaaatatggctggtctgcaggggtcatgttgcatgaaagggtaacatgcacagcagattttgaagatttagaaaaaaaaagtaaaatatcccattgataatttttatattgcttacatgttgcaatgataatattttgattatattgggttagattaaatctattattaaaattaattttacctgttcattggtactttttaaatgtagctattggacaattcaaagttacatcagtggctcgtgttgtatctccactgaatagcactggcccagggagtggagagttcatagcattgagcccttgtggcatccaacatgtagaggtcgggaagtcagggatatctagtagaagagactgagaatgagaagccagggagaaggaggagaaagagaaggtgaaggagaagcatcatgagggagcagtgtcatcgaccaagtgaagaccatgtatgaagaggagactgattctctgtgtcaagtacctgctacgggtttggtacagaatggactcaaaactgagtatggcactgtgcaccatgaaggccactgtgatcttgatgagaagtactttggagcagtgttgagggtgagaaagcctgatgggagggggctcaagggagaagcaggggagaacaattgtaaacagggcatgtagacatccctttgtaggaagtttgctacaaatgggcagcaggaaaatcgggatgatagctggagagggaggtggggtaaagagttttattttcagcataatattgataggaagcattttgtacactttctatggatagacattgttctaagtaccttgtatatattaactcgtttaatccaccaagcactctatgagttagttactattttgcttaccaatttacagatgaagaaattaaggcacagagaggttaagtaacttgcctaaggtcacactgcagttaaggagcagagctaggatttgaaccccagtcacatggctctgaggttctgctttagccaccatgctatctgcatctttatacctgacaaaaattccaggagagaagaaaattgatgatgcaggctaactgcaagaggattcctggagatttttgtctttggggaagtcaagataagatggggtggagtgggcaagcagaggacttgtccccagccagaaggaggggcagtgtatggtgcacagtgctacgggctgatatgcaagttctcaagatcagcaaggtcctccactaaatgaagtgcggcaaggaggtgctggtggtctgcaagggagatgatctgtgagccaagaaggcactggggcattgccaggagcataggaccccttgaagctcaagggcatgagacagggcatagaccactttactccagcctctccttaatgtttaaaatgggaggtctccaggcctatcctgtgccccagggctagtcccagactcccccatgggccagccctgggagacactccggggtcacctgggctcagaggatgccagacaggcgggatggtgcagaggcagggctgtgcagggcgatgggagttcatcaggtagggaccagcctgcaaccagctaaggatggacggaagagcctggcagctcagtctcctgacagattgagggctgagggggctgggcctgctgaagagggagagggcgggagtggacatcaagaagaagggcctccagggctttgaaggggcccatggtgggcctttgaatccctccatccggggtcagtgcacccgagcgactgggcccccgtgctcgccaataaagtgtgtgggacggccttcaattatggaagcgtagccaaccaaatcagctttcagataaattatttatgctgaggcctgcaagggagggagtccggctgcatgaacaacgtgttcattttcataaaaccctgcaaagttgcagtgggctggggagagggtggggggaagaagaaagatgattagattagaagaggcctgctgtaaataacacacaagcagggcgttttgtttctttttgggctgtcttttgtatcatgttttatacaacagaaaagagcagaatacaacatctaggaaatgttaatgagggttatttgctatttacctaggctgggggtttgaagaaagggctgggctggaggtgagggggttgtgtagaagattggattccatgcaaatgcagacatcagggagtctggaaggctttggaacagagctggactggaggcttgtcaggtccctgtggagagggaaagaaagcaacaaatcccatgggctggagggtgttttccctcctgctcggggggccagccaatgggcctggatgggagggaggggtcccagtgggaaggcaggtcagccccagagagcaggcaggttgggtgactgcgagagtccctccaccctgaaatctgggggatgatgacaagccaggggtgtcatttctgccttccacagtttatccacaccccctacccatgggaaaaacaggtagggatgagaagaatggagcctgcttccctggggagttaggtgctgtctggatgaccactacagccgcttcttcccaaattgatagtgctcaagctttggtggtgcaggtgacagacaggccttctctcttattctaggtgatgagatgagaggacagctgttctcccctcactcaaggtagcactctgaggtgtccaggaggcgatccacaaatcatcccactgagtgtgcttacagccggtttctcccacctcagccctgctgcgaggaaggactaagaaaaacagcctgcatgggccgggcttggatttcaagttctcaggtcatttcttcacccatgatgcgcctttacttctctcttttcctcctgagtcaccactttgtggccacggagacaatcaggcaaggcttcttggaggaggtggtgatcgtgttgggctttgaaggataggaaggatttccgccgggcgcgatggctcatgcctgtaatcccagcactttgggaggctgaggcgggcagatcacgaggtcaggagatcaaggccatcctggctaacatggtgaaaccccacctctactaaaaatacaaaaaattagccgggcatgatggtgggtgcctgtagtcccagcaactcgggaggctgaggcaggagaatggcatgaacccgggaggcggagcttgcagtgagctgagattgtgccactgcactccagcctgggtgacagagcaagactccgtctcaaaaaaaaaaaaaaaaaaaaaaaaaggatttcaacagggatggtaatattatcattcctattttacagataaagaagcaacagctaagaaaacttaactggcttatccaacatcacacttggttagtaaataatacagtgaagatgccaatccaggtgtcctaataccgcaccttatgtttttcctactgtaaagagtctcttcatttccttaccactccagagaatggcagggtttagaggctgtagtgagacatggaccctttctgtgtggtgggctgatttatatattcgtatattcccatggcccaagggtgctgcactgtgtaacccaagggggccactacatgaaggccaatcccctggagttgggtagtgcactacatgaaggccaatcccctggagttgggtagtgcacaacttgaacatctgtacctggaagccttaccggtataggttacatgtacacaatacatgtccaatatgtattattttgaatgaatgaataatgtgcatgaagaacaatttgttgaagaacaacaacaaaaaacctgtatgggactatgttttataactgttgttaggcagttgattctgtcagttgccagtgacagaatcctaattcaaattggtttcggacacaagagaatttattattttgagtaactaaaatgtctaggtcccggaggtacagccaacttcaggcatggctgggagcaagggcccataggatgttgacagaaatctgtttcagtctctagactctgcttgcctttgtgatggtttcattttcccgaaagatctccccacgaggttgcaaagatggcctctagcagctccaagcttgcaggaactctggcaataaatgagctttttttccagtaatcccagcagaagttctggctcaaggctcattggaccactgtgattgatatgcccacctgtgaaccagtcacagaggtggaggttagatgatgttagaggtacaataaattgattggcagacctggggcttggtggaggagggggggcatggagtgccctaaaccacatggacggaaggcggaagaggtgtgttccctaaagaaaactgagattctattaccagaagcagggagaatggatgttggacaggaaaaacaacagatgtccccttctgtggcagaatgcttttgtcaaataaaatctttcttggaagccagacatgcaaaccaaatacaaacagggctgtcctggggatgccagtgtggggaagagacattcggagggatcattgcttcccgaacatagcctgtgcatttttttttcactttttatttatttatttatttatttatttatttatttatgtatttattttattgatcattcttgggtgtttctcgcagagggggatttggcagggtcataggacaatagtggagggaaggtcagcagataaacaagtgaacaaaggtctctggttttcctaggcagaggaccctgcggccttccgcagtgtttgtgtccctgggtacttgagattagggagtggtgatgactcttaaggagcacgctgccttcaagcatctgtttaacaaagcacatcttgcaccgcccttaatccatttaaccctgagtggacacagcacatgtttcagagagcgcagggttgggggtaaggtcacagatcaacaggataagaatttttcttagtacagaacaaaatgaaaagtctcccacgtctacctctttctacacagacacggcaaccatccgatttctcaatcttttccccacctttcccccctttctattccacaaaaccgccatagtaatcatggcccgttctcaatgagctgttgggtacacctcccagatggggtggtggccgggcagaggggctcctcacttcccagtaggggcggccgggcagaggcgcccctcacctcccgggcagggcggctggccgggcgggggcctgaccccccccacctccctcccggacggggcggctggccaggcggggcggctgacccccccacctccctcccggacggggcggctggccgggcagaggggctcctcccttcccagtaggggcggccgggcagaggcgcccctcacctcccggacggggcggctggccgggcggggggctgacccccccacctccctcccggacggggcggctggcctggcgggggctgacccctacctccctcccggacggggtggcagctgggtggagacgctcctcacttcccagatggggtggctgccgggcggaggggctcctcacttctcagacggggcggctgccgggcagaggggctcctcacttctcagactgggcggttgccaggtggagggtctcctcacttctcagacagggcggccgggcagagacactcctcacctcccagacggggtcgcggccgggtagaggcactcctcacatcccagatggggcggtggggcagaggcgctccccacatctcagacgatgggcggccgggcagagacgctcctcacttcctagatgggatggcggccgggaagaggcgctcctcacttcctagttgggatggcggccgggcagagatgctcctcactttccagactgggcagccaggcagaggggctcctcacttcccagacgatgggcggccaggcagagacgctcctcacttcccagacggggtggcggccgggcagaggctgcaatctcggcactttgggaggccaaggcaggcggctgggaggtggaggttgtagccagccgagatcacgccactgcactccagcctgggcaccattgagcactgagtgaaccagactccatctgcaatcccggcacctcaggaggccaaggctggcagatcactcgcggttaggagctggagaccagcccggccaacacggtgaaaccccgtctccaccaaaaaaatacgaaaaccagtcaggcgtggcggcacgcgcctgcagtcgcaggcactcggtaggctgaggcaggagaatcaggcagggaggttgcagtgagccgagatggcagcagtacagtccagcttcggctcggcatcagagggagactgtggaaagagagggagagggagaccgtggggagagggagagggagagggcagggagagggagagggagagggcagggagagggagagggagagggaagcctgtgcatttttaatgccacatttctgaaaaagctgtcccctcatttggcaatatatgtcctcctctaatttacttgcctctttaccgtaaattaaatatatactgtagctcttcctactttcctcttccccagcacagggttttctaaagggtataacacaggcattgttcttctgaaatgctctgaaacactttgcatgatcaagtatgtttcgaaaacattccacttctcttggtgaactagaaagcttgttagcattttaaaggctctgaaaagtcctgcagtcatctgctgagcttcattcaactcagggttttcctaaagcaattatccacaaaatctgcttttcccttcaccaagcactgaaggatttggaattttctgggagacattgccagggaacattgcacctggcatgtttttctgtgctcactggttttatgggtatagaaagagtatttcctccttccagaccaaagtctcctctgggcatccagaccctcactgggccttggtgaacaaggttttgcttgaacaaatgatgggcaaatgtgggagttaatactgtgcccttggaaatgatgggagagctcttgacttggctcccattcttttcagcccccagcctggctgccactcgtgccttgtcctggctggccagtgagtacttttctcataccccacccatttcacagatgaggaaagtgaggccccacagacaggtgctagatgaggagactcagtgcctctcttgcagaatgtagggatttttgtaaagcagggagagtatgggtttgcattccagcaggcctggcttggcatcctggtttatccacttaccagctgtgtaacttaaggctgcttacctctcctctctgaacttcattttttctcatgtttacaacagagagactaatgatggttgaaggagagccagtgagtaacacagctaatggatgcctggctgcacgccaggcttggataggtagggtgatttggatggcatgcccatgcactgttgtttaccccctcagcctgtcagccttgagtaagctcagctcagtgcaccacaggaaggcgtaattggccattggttcgatccaggtcaagtcctttgatagcacactccaatacaaagccacccatggacagagagctgtctgagtggggccacagctgacgaactctcagccacatcctctacaaaaccacccagctgcagccagagagaggcactcccttagtcccctgcaggtagcaaagggatgagttttataagactacaggaggatgggcagggagtcgggcctggctcggccagaactaactgcttctgtgggcttggacatgggtcttgccctatctgggcctctgtttcctcttctgttaacctggggcactggacttacattctgtttcttcccctttcagtcctagaatctgatcttgcttctgtgatttcgagaggtcaggaagcgacagtttgatggacattctgaaggccttgggttctcatcccagctctgtgaccttgggcatttatgcatgaatttactgtcatgccaggtgctggagatactaaaaaggacaagacaggatcatcactgcagcatcagtgagccccctgggggaggagatgtgcaaatggccaccctgtggggtggagggcggcactaggcaccagaggagtcatgtggtgggcctggaaggccgggccggactggtcagggaaggctttgcggacacctcggggagccgacacctagaggaggtggtggaggtgtgggggccagaggaagtcgctccaggctgaaggcacagcttgtgcagaggatggtggcatggaagggcccagtgtgtgtcgttatcccctctgctcctgggaccccaggagctccttcctgggcttatgttctgtggcatgtgaattgtgggggcttggatgtggaatgaggtgctccccagccctgagctgacagggagtgtggtgtggttgcgcagatggggttctgggacgaaagttcctgagcacaaatcccagccctgtgaatttctagctgccaggctctgagtgcatcacctcccaggcggtgccctcaatttctcctctgcctggtggggatgtcggtggtgtctggtttatagcatcgagcaagttaagcttacagagcacttagagccatttctggaaggcagtaaatgctcaataaacattaactgcccctccctattttaaaaatgaagaaaaatgaaggtctgagggagtcagcaagctgtctagagagacatagcccagatgcttgcaggtccagccttgccctccctcccctccacttccctcactgtctctcacttttccctcccttcctctctcctttctttcctccctccctctaactcttgcacttcatcccctcaactcccccagccaacttctgaaaggcctccaaatgcctgggacctgctgcaaagctctttgatctgaccagaccgccggcgcctctggctgcttggcaccctgagtgaaccctctgccccccactttggggcctgtgctgaggcctagggcagagtctgggcctggtatctattctaccacccctccaaccactccctgcctgtcctctgcccccatgctccagaccgcttccggagggaaagcagcacctgggatctgtcttcagagacaagcagcttccaggcctccccacagggtagactgatattggctccctcccactgaaaatgaatggctgtcacacagccgggtcaccccagaaccccagcgactgtgggcttcctgcccacccatgggaggctctttggggccagtttctgagcctggtaaacacaagcctcctctccctcctccacggagagctgagaacaattgcccactctgaacctgaaagccggtggaggcccgctctaatgagtgtgcagctttcgctgccctcagaaatcaggcgctggctctgggcactcggcagccagatgattgaaagcccagtagggctcccagccctcccccacccccactctcttttttgtgtgttgtctgcatcactgcccagaccaatctctcttcatgctgaattttttaaagccaaattggaaaaaaattggaagtagcctgcatgctattccccctgggctccaaatgggctctccagttaggggaacaaaatacaccattttaatttataataataataattattattatcattatccataacaataacaataccaataatcccatgcatgggtaggccaatgtacagcgcataaagtgcttttccagctgtgatttcatttgggcctcgcccccctgtgaacctgctcccgccccaccccccccaccccctttgtctgtaatccgagcaggccaattgcctggtgactctcagctggggtgggaaggccagcctcaggctcccaggccctgcttttcccatgtcctctcgaagggatcacattagcaacacattttttagcagacatggcagagcacctgctccgggaagggggccggacctgtcaggagaagacaggactttgcagtcactggcctccagtgagatgatagagaaaggccagataatctcaactccacactataagggctatgcatggcctttgggagactctgggctcaaaagttgaagtcagcttgaggaacgcctcaaaagccatttcatcaaatgtggatcacattacagacatcacagtttcaacttgtcattgaatcgtaacatacgtacagaaaaatacaaaaagcatgagggtacaactcaattacttttctcaaacagaacacactcatataagcagcccaagactaagaaatggaagccccccttattctcccttctaatcactcctcccaaccagggtgaccaccatcccaacatgaaacaacatagattaatgctgctgctttttgtatttgtatgactggaatcatccacactatgcaatcttttgtgtctggtttcttttgttcgatgttatgatgtgatattcactatcattggatactgttgcagatttttcatttcactgctctgtgatatttcactgtatgaagatagtgaaatttaggtatccatttatcgtggtgaacatttggatggtttcaagttttcagttattatgaataaagctgtttatgaacattcttgtacatgctggttttttttgtacttgtgtacacatttctgatgagcaaaaactgaggtgtggaaacatggaatcattgcatatgagtaagtacatgcagctttaggagctattgacaaacagtttcccaaagtggttgcaccagtttatattactggtttttagggtctatgtggcagtacctccaattccatgaatctatagatccttggatgatctgatggaagctgcagaatttcgccccagaaatacaattctgcatgtgatttctgtaaatttatgagccctgtgaactcaaccaggtccaaggattcctatgaggtctctttttctgatctccaaattctgaggtatgttgtccacattttgattctgggttttaaattctttgactggatggaagacttagaacttaacagggctgggtgcggtggctcgtgcctgtaataccaacactttgggaggccaaggtgggcaggtcaccctgaggtcaggagtttaagaccagcctggccaacatggcaaaaccccgtctctactaaaaatacaaaaaattagccgtgtgtggtggcacgcgcctatagtcccagctactcaggaggctgaggtaggacaatcgcttgaatctgggaggcagaggttgcagtgaactgagatcgtacctttgcaccccagcctggtgacagagtgagaaaagaaaaaaaaaaaaaaaaagaacttaacagagcaccagcaaagcaggggcaccaaaaacaaaacaattttaaagaaaaatatttttgaaagaattttataatttcacagaaagcatggacatattcgtcaaaggaaaacttatgatgttgttggatgtccttacacatacctaacagattagagttaattcactttacgttatatatgggaggcacataatcttttcaaggcaaagtgcttttaaatgccttcacctggccctggtgatcccatcagtgatgcataaattgcatctggtcagtgattaccccatgctgcactggggcatctgtgcagtgaggggtccctggctgctaagggctccctgtcccattggatcctcactacaaccctgccaggtggctgggctgtgtgtcaccaagcacatgggcaacacagcttactgtaagggaaatgagggccaaatgggtcagtcatcgagaagcctctgcaggtgagtggtggctgtaggaactgggcttctggtttaagaacagggacgtggaaggtgtgggagtggaaaggtgcctccatctttctgcaaagcagcacagatgaagagggagctcactgaaggatagtgctgggatggatggtagaaactctatgaagataggtttctgtttgatgtgagaaaacatccaagtgttcaactgtgtaatgatggaagccgagtgtttgaggggtagtgagatccttgtccctagaagcatgtaagctgatgctggatggtcacttgacggggacgttgatgaactaaacgatctaggtttccttcaaccctaagcttggccatcctcagaatctaggtctcctgaccctaccacatgctctttcctcctcgccgctgacctgatggagtgcagtttgcacagtgcactggcccagcctgggcagcaggcaggagcctgcatgaaataacgtatgctgcagtcagagtgacagagtgtctgtagaaagcattcaagatctcccaggagctgtgactcgtatgagcaggtctctgtggattcaggcaaatattttccatttcataaaatgtggtacaatgttacctctgtgttctttgaaaaactggcatgggggaggaagtgttaactcaatggccttgttccctgagcgctggtggccgcctgccttggcagtttccttggggcctcccaccccactgggccccatcatgggagagctggatgagcccactgctgctggtccatggtcaggggtgggtgcagacgatccctgaccacctgaaggagaaatagaatgcagagcatgactggaaccctaggaaggaagaactctgttctgttaccatttctgctatggccccctcagccatgcccctcccttcatcatcattccctctgccctctgccgggactagtgcagtagtctcttcccggagctcacctcctccagtctctccttattctgagccaagaatgccacatgcttggcatgggtaacatgatgcccactcccttgcccctacagactttaccatcagtctcaggactcctcgcagagagcctctaataaatgattaattcacctgagtgggcagtgacggggaaactgatttgccaaatgtatctcctccatgcttttgacagagcaccctttcaaagaacagagcagagctcagatgacatcattcctccctgcctccccgcctcctacttctcatcagaagcacgcacgaaaatagctttccatgtttctcatggtgcttcatagcgaaggccaaactcaactgtgtggcactggaagcttgtgtcaatttgatctggttgtggaatcttttcttccacacagcttgcgatgcttgctcagttttcttttggaagatatgaagaacggtcacactatcccatctgaccccatccaaatgccctgtgcttcaaaggccaaagacatgctgtgttgtcccatctctcagtgatcgcccaggttgtgccctggcctggagtgtctgtcccacattccccagcatacagagatgtctgggcttagggggatgcccttttcagctttcagtgttgtttgctgcatggaccttgctgatcttgaaataggctctgagcctcagagttttccacaaatgtccagttcctgcccctgcccctgccccagatcaagggtaattgtggagggctctgtggtccaggagcccaagaaggcccttacagcacagcctcttcctgccaatccagccttgctgcaaggtccagataagccccttatgtgggagcttgagcagagatcccagtttgtgtttaatagagcagctacagtcaagcttgtgatctgcaggtgttagaacactcattggagtctcactagcacagtggacggctctcattagggtgtcattagctagctgcctcatttgcacgttcagatcaggctcaggcttcatgacagcaagggctataaaaggaccagcagggctgtgaagaccgctgcacatactttagtcttgaggggggccacacaggggtcggtgataagggcagaattagagccctacgatgatcacacagcacacgccaacacagtctcccggttgctcactccggacaccctgggagatccccgtggtctgctttctcttctccttcatatcaaacccaaccatcctctgtcagttccttttccccagtgcatccgcgtttggttttcttcccttcgtgctggtgtcaccgcatagccagctggcggcacagattcccacttgcctccatgggcctgggtctccactccagcaggctgtatgagctctcaacgcatggactggattgtgtcatcccctgctaaactcttcaatgacttcctgttgaacttggaaggatgtccagattgcttcccatggggcttgcatccatgttctagcgtgtcccacctccactggcccccaacgctccagccactctgttctgggacactcagcatgcccctacctgggctctgtgcttgttcttccctctgcctgggtcacacgcctcccaaatcttgcgtggatgtttccttgtcattcaagataagggctggtgggtcttgatgcctgctgtttgcatgcatgcgtgtgcccctgtgtgcaagcctgtgggattggggtgggcaagagaagagcaaggaatggtggtgctggaggagagagcccaggctgcggataagaacacacagcaaatacctggtgaaaaggaagccatgctgaaaggcgggctgtgtggttggatggacttggcttccagccctcatttcagccctaaatggctgtgggacctcagccaaattactttctcctccaagcctcagtttctccatctggaataatgagatcctcatcacagctattcttcagggccattgtgaaggcagcaataacttagatgaaggattgcaggcagtgcctggcatagcatcaggacttaataaatagtaatgttttaattttaagtagaaatcaatgtaacagagagacatgagctgggacacagaagactagcattcgtgcttctgactgctgtgtgaccttatgtagccagctgcccctctctgacttctgccaccaccaacagccacaatttggagggaatgggtatgttttctctcaccgaatctttctggaaagtggggccagaacagctctcagtatcacaagaggaccacagaagattcatactagggttccagacttaggctgggagactggacagcctttgtggtgaagacacacatgataagaagtattatttgggggacatcgactatgaattgtgcatggtgccaggagttttatacaagatataaaatccttatgtctgtcctgctaattaggtgtgctcttccttattttaccaatgagcaaaatgccaagactggtgatttgccaaaagccattaagatagcaattggaagcattgctaaccgactttaagatttaaagtctattttctttccagaaaccacaatatagaagtgtcccctaaagctttcttttttttctttcaattcttttgggaatatatgaagcttgcttgctgatatggtagcccctagccaggtgtggctggtcacattatagtaactaaaatgaaataagagaacaaattcagttcctctgtcttaccagctgcatctcaagtgctcaatagccacatgtagctagtagctgccatattggaaggtgaggatatgcaacaattccatcgtcacagcaagtcttattggacaatgctgccccaaagataagagagcagcatgctctatctatgaaaggccgggaccttgactggggactttaatgaatggcacaggtggttgcacaccactggatgtagattatggtgctcaggggcaagcaaagctcaccatggggcagggagatgagtttgcctttagaggtgcaggaatgactcctttcccaagctacctactgctctggtcttacgtgttctctggagttctggagtagcactgtgttaaactgcttgcttctcggagcgtggctcaccaacaaataatatcaacaaacctggaagttcattggaaatgcagaatctcagatcccaccccagatctgctgaatcacagtctgcattttgaagaaattccccacgtgactcgtgtgcccattgcgtttgagaagcagggggctacaccacactctacaatgtttactatggcatttagtgtcaactcttccaggagatgtcttctaagttctatgaaatctgtgtatctagaaccatccggtcggccacaaggctctggtggggaagcattttctttagagtgtaacacaggtcattttttaatttcttttagattgtacatatctaagatcaaagctagaaccttagagataatctagccccaaatattcatctcagagatggagaaacaacctcaaagaagaaaagcagcttatccaagatcatacagcagtgctggagcctacaccacgtgacaaggtacagcgtttcagtgacacatcatactggacaagagaaaagcacagtggtatagtgggaggacctggaactgatgtcctttaatgccaaatgtggggagcgtctattattgtcccaaccctgtccaaggaagtgctactggtcaccatggttgccatttactgggcactcactgtgtaccaggcactttcctgggtgtttgcgcttgttatttcattgcgtcctcatgacagttctctgatgtaggcattgttactttctcctctttaaagatgaagatgaggaaactgtggtatagcaaggttaaggagctcacccaacatcacacagatagcagacagtggagccagaattcaaacccaggacatcaggctccagagcccatgctcctccctcccctgtacactgtagagaattcagaggtgaagcagttccctggacacctgaggctgcacaaggcaagggaaaggctactgtggacactcagtcatctaccccagatgttctacttggaagtaaagacagaatccccaaaacgctcattttagaacacatgctgttaggaaataacatgtagaatcattggctttagaacttggattttagaacgtgagataaattgtggtgagatgagaggaacagttatcatcttaacaccagaggcaaaagtttatcttagggagagaaccatgtttgtttaagaaaaaaggtggtaaattgcttgattgagggaggtaaaaccttaagaacatgagtgggaaagagaggaagacacaaaaataagctaaactagtgcacgggaaaaggatgatcagatatttgagtgttgggcagagaagagaggagagaagaaacaaaggtgagaggaggcaaagcaatatatttcctgaaaagatcaaggcactcttttaaaagcagtatctaatatatgattgctttattttttattttttgcattagtttgatatcctgacatcctacacacttttttcctcttaatttcagtcatgtctgctttgtaccaaagggggcttgtgtgtgtgtgtgtgggtgtgtatacactcatacgtgcccatgtgcatgtgcacactgatgtgtatcaagtatcaagggagggtgtttaatttctctctaggtggggctgtggcaatatccataccgagtctaattaaagggaagcaaaatcttccatgcggatatgactaacaaaaatgtcggccaccagtggtgagcatttgttgtttttgcctgcccattcattgattaattcttccaagaaatatttactgagcaactattatgtggtaggtaatagatgaggtcagggcaggacaaaaggtggggggcaggtggtatagggctttgtgtagtttcaccaagacttgttcctgggtgaattgaagaactgctgctgcattttgagcagaggagggagctgattctgtagttgtcaaggatcttcctgaatcctaggatgataatagattgtgagggaggtgagagaggtggcaaacggaccaattaggaggctactgctatagtcctagcaacccttgaagctgagttggatgggagtagcagtagagacagtgaggatttctgttacgaaatgtgaaggaggaagttggcatagaggtctggaattaagggagaaaagttcagatggaaatatgaatttgggaatcatcaacctataggtggaatttaaagccctaagataaggccctttctcaaccccatctctgagattttcaaggtaatgagagtagattgagaataaaagagactaaggacagagctctggaggatttcattcagccttttgttcacaccactcaactgaaaccactttgttaaggtcaccaatgatcttgctaaatctaaaggccctttgtcagtactcatagtatttggcccacgtttgaataaagtttgtttcgtatgcaaaccagagagtcatgattaatacacccttccttcagaattcctagagatattaggataaatgcatgggaccctgtatgtgtgaaaaaatttctgtcaaatttatttggatctcaaaggacagcaggccacctcatctgatttcagggacacaaacaaatcatataacttaacatatacaatgggggagaattaggctataacattttgaagtcttgagcctggatgatgcaaaggaatgcttgagatcactgtgttttattaatttcaaatttcaatattcattgctggtatataagacagcaattgagttttgcatattgactttgtgtcctgcgactttactgtactcacttatttgttctgggagttttttgtagctcatttggggtattctacatagacaatcatgtcatctgtgaataaaggaagtttaatttcttctgtcgcatttctttttcttgtcttattaaaccagatagaccagtacaataaataaataataaacaagattattatcttattaaaccagataggatcagtacaataaataaataaaccagtacaatattgagtaggactgctgacaaagaacattcttatcttgttccaaatcttaggaagaacgtgtacattattaaatatgatgtttgttattaagttttttttagatgttctttatgaagtttagaaatttttgccaatatttctagtttgctagttatagtttctagtttgctaggaatttttttcaaatcatgaatgggtgttaaattttgtaaaatgctttttgtatcaattaatatgctgtaaatgttcttctttagcctgttgatatggttaataaattacatggagtgatcttttaaatactgaagcagccttgcatacttgaattacttggttgtggcatgtacttctttttatacattgttggctctgatttgctaatattatgtggatttccacacataatatttgtgaaacatattggtctgtagttttctttacttataatgtatttatctggttttggtactggagtaatgctagcctgtagaatgagttaggaagtgttccatctgcttttattttcaggaagagattgtagacgattggtattacttcttcattaagtgtttggtagaattaaccagtaaaaccctctgggcttggagcttacttatttggaaagatttaatttctttaataaatagagggctcttcaggttatctgtttctctttatgtgcattttggtaatttatgtctttaaacaatttgccgatttcatctaagttattaaatttgtgggcatagaggtgtttttgaaattgttcctactatccttttaatgtccatgggatcagtagtgatagaccttctttcatttctcatgttggtaattcatgtcttctgtcttttattctcagttagcctggctataggtttattaatattactgattttttcaaagaaaaagcttttggttttgttgattttctttattgcttttctgtcttcaattttattgattcttgctctaatatttattatgtcatttcttctgcttactttaggttaaatttgctctttttctagttttacaaggcggaagcttagattattcattttagatcttttttcttttctaatatatgcatttaatgccgtttatttccctctaagcactgatttcactgcattccacaaattttggtaagttgtattttcatttttatttagttgaaaatgtgctttaaatttctcttgagaattcttcattgactcatggattatttacaactgaattgtttaatttctaaatacttggggatgagtctactgatttttgggatgcactgtgcacatttctaaagttctccagagctgccttagggttgcctaaggaggagatgctgaagcctagaggaacaggtctggctgtggcacttctgccttcaccttgctgcacgcagaaattcacaatgtcgacatgttttgttaattggctaggttatactgtggtgtgctggtaagaacctgctggttagcacagcagaggcttattcctgactcctgccactggtcaatagagggttgtagggaggctctgctccatgtaatcactttggaactcaggctaacagcaatgttgccatcctgaagctgcagcatctggagcatgtggccttttccatgaccatggcaggggaggaaacagctggagggggctcgcacactggctattctagcacttagtccagaacagctgtcacacccactggtatcagagtcctttggccagaagtagtcatgtggtactacctaactgcaagggagctgtcaaacgtagaggattagatggagtttttggtaaactctactgtctcaaccacgattggtgttctccctaagacttctttgaaatgcagttttgctgcccactccccttgttgagcagacaagagtgctatttcaacattcatttccaaggaatagatgaaccatgagcacttcacaaccctttgaccttgcctcaggtcacattctctccatgtatataactcagcacatattagctggaattctggactcctcagtatgagactttaacaggtaagaagggtgaataagcctcaagtgcatgtgtgttagaagctttataaacccctttttctgtcacatgcagacaattagagaaagaaaatatgcaaaaaatgctttggtgattgccaagactcaaaggatttgagagtaattccaattcacatatatttattgctccattgttttgccaggtataggaatatttgtaaaaatgaagaaggtaacaggaggaattgctcaagttagactaagatgcaggattcctgaattcgagcaaatgacaacacagtagacagtggctgctggccattactatgtattattattattttttgagacggagtctcgttctgttgcccaggctggagtgcagaggtgcgatctcagctcatggcaagctctgcctcctgggttcacgccattctcctgcctcaacctcccaagtagctgggactacaggtgcccgccaccacacctggctaatttttttgtatttttagtagagacggggtttcaccgtgttagccaggatggtctcgatctcctgacctcatgatccacccgcttggcctcccaaagtgctgggattacaggcgtgagccaccgcccccggcctctatgcattattaagtgtagctgttgaggcgttttccatcatgggggaaacatgcgtggcatatgcaggctttcatctttgcccgttctgatcttttctctctctttccctccctcttttgctctctttctatatatagtttatctgtgtgtctctgtgtgtgtgtgtggggggggtgccaaccccctgtgcagtaaaaaatgtgcatataatttttactcccacactacttaactcctaatagtctactgtcaaccagaagtcttaccaataacataaacagttgattagcacatattttgcattttatttgtattatagactgtattcttacaataaagtaaactttaaaaaagaaaatgttattaagaaaaccatggacaggtgcggtggcttacatctgtaatcccagcaccttgggagactgaggcaggtggatcacccgagatcaggagttcgagaccagcctgtcccatatggtgaaaccccatctctactgaaaaaaaaaaaatacaaaaaaattagccaggcctggtggcgtacttctgtagtcccagcaaattgggacgctgagacaggagaatggcttgaatctgggaggcggagattgcagtgagccgagatcacaccactgcactccagcctgggagacagagcaggactccatctcaaaaaaaaagaaaagaaaaagaaaatcataagcaagggaaaatatattagcctattcaacatgaagacgatgacgataaagaccttcatgatgatccacttccacttaatgagtagtaaagaggaggggttggtcttcctgtctcaggggtagtagagatgagagaaaatccatgtataagtgaacctgcacagttcaaccccgtgttgtccaagggtcaactgtatttatactaatatgttcataatatctattttagtttttattgaaagagtaattcaaatagtcctaaaaagtatgtgatcaaaagtaggtttctgctttacacctggtccccaagtcctcctccctagaggcaacaattctcataaacttcttggatgtactttcagaaataatctatgaatgtgcttaccaaaataaatagcacaacttactaaaacaaataacattcttcttcaacaccagcaacaaacaatgagataaaatgatagaagatatcataattttcacaatagccatgaaaactataaaatgtctaaaatttggcctaaaaatattgcaggatgactttatggagaaaaagtttaaaaccctagtggagtgtacaagtgaacatacacaattctgtatgtgagccatattcgtggattgaacagctttatagctatgtcaatgctcctcaaataaatctatgcattcagtgcaattccaaataaaaaatactcatcacaaatttttgagaaagttggtaatattactctaaaatttatgtgaaagagtgtcattatacaaagaactaagttttgagcaattctgaacactaaaaacaaagaggtagaatttatcctcctgtgtaataggtacattacaatgctacggtaataggaagcaaaaatgtagtgacatattgtagaacagaggagtgaacagaacagagggctcagagatagacccatgtatatgaaattatacatggtaaaggtgtttacaaatcagagggcagatttttgtttactggaagactgtgggaaaaattattatgtcaataaaaacaaaattggatctgtctcacagcatgaacaaaggtgagatcaaaatgaattaaaaacttaaatgcaaaagataaaatataaatatatgtggatgaagagacaggcaaatatctttgtgtcttttgaggaagaggaagatgttctgaacaagactgaaaaagcacaagccccaagggaaaaataatccatggatctgatcagatcaaaatcaaggatttctattcaataaaggtcaccatagacaaaattaacaaaacctgagaagtaatgaatagcaagactgtacaagaaaatttttgcctatgagtgagaaaaagataggaaatacaagaggaaaaaatggccaaagactgtgagtaggcagtgcacaaagggagagacccaggggacaaaaaattgtagatcactctgcaatagagcaatacacgtttgaccaaggtgtgacttcattcacattagctggccaaaaaatcaaaagttggtgaacatcagatttgacccaaaatgtagaaaactggaaattcttatccactgttccgggaactgtagatggtctgtttgtacatatgaaaattcgatgatcagatactccatgatccagaatctactctcaccttcctgtcaatcctagaagccattcactgaatcatgtttgtgggagtagagggatagaggctatttaggggtctatgctggggccttgagtaaacttattagaaaatgctatgcagcagttagaagcaagaaaaaaaaatgcacatggagaaacatgatcccatacaaaatcatgttgagtgaataaaaattatagaatgagatatgtaatatgctaacttttatgcaaatttaaagcacatacaatcacaaaatttactacataaagaagagtgatacatcagacacattagacgtgttcctaccatgggagggggaaagggagtgagaaacacgcatggggaagaataaacaaaacaagagaaggcagaatgggagagtctcccagaaatggtcaagtatgatcaactccagcctctgccctaaagaataagaaatcaataaatagatcaagaattcattttattccttaaattttaccacaaagttgagttgtactttatttgttgacacattacatttcatagacaattgaatcttctttaattttagagtttacgttttctttttatatttaggaaactttttgccaggtgccaaatattttcttgtgccttttgaagacatgctaggattgaggcacggacctataccattataaaacataattgtgtacatagtgtcagatttcatggtcatattacaatatattacaatgtattcactagtcagattttgctggatatttggattgtttacagtgttctttttacttataaacaatgttgcaatgaacattcttgatattcgtctttgcactggtgatgtatatcagcaggttacattgctaaaagtagcattgccaaggtgatagatatttatatatttacttgaaaagaaactgacaaattacccttgtaccaacttatactgtcacccttgccaacattaggtattatcaaactttttaatttttgctgttaattaatgaaatattttattcattatttcgatttttatttacttaattagaaatggctttgcataattttttcatattgtcaaaagccattcatattaccgtagttggtctttttcttattaattttccagtataccttatttattaagaatgttaattctttttcatatgttccataaatttaaagctagctagatatatgtttatctctatctttgtgtgctgtatctaattgtgatttttgcaataacttgatggcaaaaccagcaattagttttgcaccagccaaatatatctagataatttatttttatcgtataactttcatggctttattttttagtttcatttaatctacctggaatttactttaagaagtaacatagggacttaagagcttaattttttcccctgtacttagtcaattgtcccaacattatttattgaatcacccatattttcccattaatttaggatatcacatttgtcatacactaaatatactaaattatttggaagccgtttaaaaagttagaacttttttcccattgatttgcatcttgttaatatgccaatatgtaatagtcattctagatttatgggataattggattcactccttcttagcactcctattttcataatttttgtgttgcaaagtttcttgtaagtttattttccatatatatattgtagaatcatattgtctagcttaaaaaaagtgaggagggcgtctgtgcaaggggatggcctgccatggggaagcagagcacaggccaggagaggagcatgtccatgcagggagaagcttgtggccagaacgagagattggttacgtatagatcagataagtaaatctcatgtttctggctgtgggagaagagaattgcaactatagaaaaggagaaaaccgaatggattctgtggtactggataggaacagaaggttttgttgtgaactcatggttaagtataaatgtataaatgtaaatgtgtatatgtgcatgtatgtgaagtgagtatattctagctctgatcactgaaagagcctgggggtggtgacaccccagtggcaaagagcacacctagcagcagtttttggcttctacatagcatctgtattatgcaccaacctaattgtttcctgttgttgctgtaacaaatcaccacacactaagtgaattgaaacaactaatttattatctcacagttatggaggttaaaaatccaaaatgggccccacagggttaaaaatcaagatattggcagagtagggaacatcagttcaacctggaggttccagccgtgaatccattttctttccttatttcagcttctagaggccaccacattccttggcttgtggtcccttccatcttcactgcccacagaggcctcactgtgatgtctgctttcttcctcacatctctgattgattttccaggctccttctttcactgataagggctcttctggttacactgagcccacctgggtaatccagaataaactgcacatttcaagataaattcctcttaataacatctgcaaagcccctttgccatgtaagataacatattcacaggttctgatgactaggatgtggacatctttggaggctattattctgcccaccatccccttctccattaaaggggcctgggagcaatggctgattccagggctgaagcatcttgttgtgccagaaaataagaaaggattcaaagaatgaaggaggcctttctaaaggacacagaagccaaaggccaggtcaagaacaagatacataatgacagttacaaattgcaagttagaacaacatagatatccaggagttcatatggatataaataaattaatgaatacattctgagcttcaggatgggcgctggtcaccagaaagtccaaggcatgatttgagagttgaaactttcagaccttccaggagaaggaaggagggacagatagggcccaattaccaatggtcaatgatgtcatcaatcatgcctctgtaatggaatctttacagaaacccctgaattgacagggctggagagcttctgaattggtgaacacatggaggtgctgggaaggttgcttacttggagaaggcctggaagctccgtgtcactgtctatcttcatactttgccctatgtatgtcttctcatttggctgtttctgagttacaccatttataataaactggaatacataagtaaagggttttcctgaatactgtaagtcattctagtgaattattgcactgggaccagggatgttgtgggaatctctgaatatataactggtcagtcagaagtacaggagacccaggacttgcaactggtgtttgcagtgggggcagtcttgtgggactgagtccttaacccctggggtcttcactaaccctgagtagtttgtgtcagaaatgaattgaattgttggacatccagctggtgtcagcgaatcagacagttgatggttgggaaagacaccccatatttgctgtcaagagagttggtgggggagaagcactctcacctggagaactattcccaagaaataagggtaaattagaggcagaccaaaccacaagagagctgaaatcctgccttcaccctggattggagtaaaaaaatcagtcactactttattgatcattggaagaagggtgagttctctcaggcaaaactaatctattgtgtgagaaatcaaaagaggggtcactcttgaggagaggactgtagtggttaaaaggggcacaagatgaactcatggggctgccagtcatgatgggtttggaaccaggtgctaggtatacagatgtgttcagtgtgtgaaaaatcatcaagcagacattgacaatctgtacctttttttccatgagtatattacactttcaaaaagaagcatacatttaaaatattccaagtttcggttctgctaagatggagtagccccattcctcccaggttgtccttcttacagctaaagaacaactgccatgaacacaacaaacaagcacaggaagacctggacaggtgggaagaggaagggtccttagcacctgaggagcagcctggcagagttcctcaggtttccttgtagcctcccatgtatcccagccagggtgctgcagaagcctccaatccagaacccccaacaggcacagataaaaagctccaagaaaacctattaccctgggaaaaggaccaggacaggagtgaccaaacaacagaaaactttgttggcaatacctgccttactccagctgaatgcgagtggaaacatcatgcccacccaaaccctgggttttagcaggactgagccagaaattgagcctgcaccctccttcttatgtcctcctccacttcactgaagcagacagtgctttgattaatccttcagggagatgccaagtggagaggtaaccttccatttcccccagtggaactaggcagtgctcccgcttcctgccaggctagtgctagctgggctgagtaggaagccaatcatcaattatctggccagtggaagcagtcagtgctctagctcttgaccaggatagcatcagtaggttccagtggggagccgaccctccacccacaacaagggggtatgaggtggtacaaggggaaatagtcaacaccccgcttttctgctatcccggcgtagtacgtcctggagaggtgctgagcctccagccccacttagcatcatgagagggaatgacttcgggtgggcagggctagatggcacttcagctgcttcctttcccttccctgctatcatggtgtcagcaggaccctacgggtagctgagcttcctcccacagcctgcagcaataaaagagtgtgagtcagccctatgctttggccctccttgtggcatcaaagtcccacaggaaactgaatgtaacacccacacagccctctgttacaccttaaagggagttttattatttcctccttaattcctgaagaatgatgaaaaaaattaaatgagataaagagttttataacataatgtccaaaatgtccagcatacagtaaaaaattattcatataccaagaaccaggaaaaccataccatgcataagaatagacagtcaacactgagatgaatcagatgttagaattatctgccaaggactttaaagcagccatcataaagatgcttcaatgagcaattttgaattcccttaaagcaaataaaaaaaaattgaaactctcggcagagaaatagaacttataaaagaagaactaaatgaaaattatagaaaggaaaaatacaataacacataaaaataccagctggatggatgcaacagtagagcagaaatgacataagatagaattagagaacttgaagaaacatcaatagaatttacccaacccaacctggtcaacagagagaaagtagactgaacaaattaacagagtctcaggatctgggcaacaataacagaagaactaacatgtgtataattggagctccagaaagaggaggcagagactggtccccaacaacactgaaaaagtaaaaactaaaaacttcctaaatttggcaaaagatataaacctagagattcaagaagcagagtgaatcccaaataggataaagccaaagaaattcatgacagacacatcataattaaacttgtgaaaactaaagataaaaaaaaatcttgaaggtatccagaagcaacacattatctctaggaaaacaccaatttaaacaacagagaatgtctcatcagaaatcacggaggcaaggaggaagtattgcaacatttttcgagtactgtaagaaaataattgtcaactgcaaattatataggcaaagaaaatattcttcaggaattaagggggaaataataaaattctcaaatgagggaaaagtaagagaacttttgtcagcacacttaccttaagaatggtttaagaaattgctctaaataggaagtgataacagaacaagtattggaacttcagaaaagaaaaacaaacaatgtaatgagtaaagataacagaggatcctccttctcatgagtttcttaaataatatttgatggtagaagcaaaaattataccaccatctaatgtggtgctccatgtatgtagagaaaatgcttacaaaaatagtaggaatggtaaatagacccaaatgtaagtaagatttctaaacttaactcgtgtagtaaaatgtcaatattagtagacagtgataaaccatgcatgtatattgaaatacctagagcaaccattaaaacaattatacaaagccatatgctaaaaatcactaaaacaaatcaagatggaattctaaaaaatatttaactaacccacaagaaggtgagaaagtaaaagcgagaaacgagaagcataggaaatggacagaaaacaaattaataaaatagcagacttaagttctaatgtatctacggttaccctaaatgtaaatggtctaaatagaccagataaaagaaagagattgaaattggcagagtagatttagaaaatgagcaaagagttcttgcctacaagaaatttgttgcaaatacaaaaacataggtacgatgcaagtaaaagggttgaaaatttataccataaaaaattcactgaaaggcaggactggctctactaatatcagaaaattaacttgaaagcaaggaaatgtattacagacagagggacaattaaataatgacaaaatgaccaatctatcaggaagacataacagttgtaaaagtgtatgcaccaaacaagagagcttcaaaatacagagacaaaaaccgatagagcttaaacgagaaatagataaatccacaattatagttggggacttcaacatcccaatctcagcaattgatagaactactacacagaaaatcagcaatgatataaaaacactcagcacaagcaacaggattttattgacatatataaaatactctacccaacaacagaaaaataaacatttatttcaaatgcccatggcatattcactgatagaccatatcctaggacataaaacaaacctcaacaaatttaaaataattagaattatacaatatgatctctgattataatggactctaatgagaaatcagtaagagaaggataatttttaaagtctttaaacagttggaagttaaaccacatacttctaaataacccatgagtcaaagaggaagtctcaaaagaagtttaaaaaatacatggaatggaatgaaaatgaaaacaaagaatatcaaagcctatgggatgcagctaaagcagggctgagagggaaattttatatgacaaaatgcttaaattatacaaaagaaaggatctcaagtaaataatctaagttcctacttcaagaaatgagaataaggtagaaatataaactaactgaaagcaagcagaagaaaggaaataataacaatcagaacagaaattaatgaaattgaaaatataaaaacaatagaaagaaatcaataaaaaaataataaaattgataaacctttagccatactgataaagaagccataaatcgccaatatagaaaaaaacgggctatcaccacaaatactgcagacattaaaatgataaggacatataaattcacactgataaatttgtccacttagaatgaatgaactgattcctctgaaactacaaattgacacactgaaccaagaagaaagaaataatacaaatagtcctacaaccatttgaaaaattaaatatggctggtgtggtggctcacacctgtaatcccagcactttgggaggccgaggcaggcagatcacttgaggtcaggagtttgagagtttgagaccagcctggccaacataatgaaaccctgtctctactaaaaatacaaaaattagccaaccctggtggcgggggcctgtaatgcaaactactcaggaggctgaggcaggagaagcacttgagtccaggaggcggagattgcagtgagctgagattgtgccactgcactccagcctgggcaacagagcgagactctatctcaaaataaaataaaataaaataaaataaaataaaataaaataaaataaaataaaaaacaataaaataaaaaattaaatatataacctaaaatctcctaaaatatatatccaggtccagatgccttcactggtgaattctaccaaatagttaaatagaagaggagagaacactttccattgtgtcagactaatatattacccagacaaagagagcacattaaaaagtacagaccactatctctcatgaacttagaccccaaaatttgtgacaaaatgtaaacaaatcaggctggtgcagtgactcatgcctgtaatcccagcactttgggaagcagaggctggcagatcacttgagaccaggagttcaagaccagactggccaacatgatgaaaccctgtctctactaaaaatacaaaaattaaccaggcatggtggtgcgtgcctgtaatcccagcttcttgggaggctgtggcacaagaattgcttgaacccaggaggctgaggttatagtgagccaagatcatgccacttgcacttcagcgtgggcaacagaacgagactccatctcaaaaaaaaaaaaaaaagttagcaaatgaaatcttaaaaagtatatatagaagtgaataccataaccaagtggggtttattttaggtgtgtaaggctggttcaatacttatagatcactcagtgtaagccatcataaaaacaagctgaataataaaatcagatgatcatatcaatttacacgaagtagtttataaaaatctaacattcattcatgacaaattaaaaactcgggggtggagaagtaaagcagaaagaaaggacaattttctcaacttgataaagagcatctacaaaaaacctatagctaaaatcatacttaacagtgaaggcttaaatgatttccctctaatattaagagaaagggagaagtaattaatatatgctctcaccactcttattcaacatattactggaagtcctactcattgcaataaagcaggaaaaagaaataaaagacagaaagaaaactctccctaagtgcagatatatgataatttacatagaaaatcctgagaaatgtaaaaaaggaaaaacaaaacagaaataaaagacaaaacaccaaaacctactagagataacaagtgagttcaaaagatcccaggctacaaaatgaacaaacaaaatcagtcacttttttgcctactagcaatggacatctgaaaaccaaaatttaaaacacaatactatttataattacttccaaaaaatgaaatacttaggtgtaaacttaataaaacatgtacaggatgtgtatgctcaaaattacaatgtgctactaaaagtagttaagttaaagaaggcttaattaaatgaagagacatattgttttctctctacttaattgatgaacatttattgaaagacatgaacatacatttcattgaaaagtatgtgtaaattgcaaataagcccatggaaagagtttcaatgtcattagccattagggaaatgcatgttaaaaccaaaatgagctatcactacacacctatcagaaggctaaaataaaaatagtgaaacaccaaatactgacgaggctgcagagaaactagatcactcctacattgctggtgggagtgaaaaatggaaaacagcttgacaatttctcaaaaaattaaatgtccaactatcataatacctagaaattgctctcttgggcatttattccagagaaatgaaaacatttttacacaaaaacctgtacataaatgttcttagcagctttattcataatagccaaaaactagacacaactcatatattccttaatgggttaaatgaagtttgatacacacttggtaatataataaagccatggattattgatacatgcaacaacatggatgaatctccagggaactgcactgagtgagaaaagacaatcccaaatggttacatactgcatgattccatttatgtaacactattaagataacggaattatagaaatggggaacaaattagtggtttcaggggttaatgtgggaataggggcaaaggagagtaggtttttctgtaaaatggcagcatgaaggatctctatagtgatgaaaatgctctatgtcattttgattgtatcttgattgtagcactgttaatatcctgattgtgatattatactagattttgcaagatgttactatggtgggaaactgggtaaagcatataaggaatctttctgtattatatttttacaactgcaggcaagcccactattatctcaaaaagtttaatttaaaaataagtaataatacaggaacaaaatgattaatgttacaaagttaaaatatttcctatgaagcttctggatttggtactctggagagtggagtaatagctctttgacattttcccaatttattctctgataattagtctcattatattttctaactctataaattatacttacacagcaaagtattcatttcacacaggttttcaggtttattttcagtgttgacttcatcttttatggtttgtttttctttgtgattgtgtctgcattttcatttctacttttgtgtatctgtgatttcaccaattttttttctttattactctgcctagttttatttttttcaaaaaaaccacaaagatttagggtttttcaattttttgtttttttaagaaaataagattttgggtttttttcccccaaaggatctgcttttgaatgtactaattcctctgtctcttattttataattaatttacttctgcttttatccttactaattctttccttctgcttttctcatgtttaatatattgttctttgtgtaattttcaattgaattattttcatttgttcctacttaatgagataaaccaaggctgtgaagtttcttctgtgcgctgccttagctgtacccatgagttatctcaggcagtgttcttgttgctgtttcctggatattcactgttaatttttttgtttggaccataggtgctcagatgtggggtagccataccacatgattgatccatacatggagcttttctattctgtatgtatttgttggttgcttgcttttaatactaaacaaaaagctgtgaacctaccacacaatgagtcactagcactccagtagaaacttgagtctatctttgggattctgtcttactccagccccctgttgcttttcacctcatttgagctcattagaaatcttgtgctgatgctttacttcccaaaccctgttttaaaaacaacttgagataaaattgagataaaattcatataccctacagttcaccaatttaaagtgtacaagtcaatgattttcttacattcacaaccagttgtgcaaccatcactaacatctaattttagaccaatttggagaatattgtcatattaactgtattatgtctgccaatccatgaacatgagacgtctccccatttacatttttttccacaatgtcttgaagtttcagttggtaagtcttgtatgtcttttgtttaatttattgttagatattttctttctgatggaattgtaaatgtaattattttcctaatttcatttttagattgtttattgctagtttatagagatatgattgatttttgtattgatcttgtatcctacaatttttctagagtcatttattaattctaatagattgttactggcttctttaggatttttctgtacaagatcatgtcatctgcctatagagatagttttacttcttcctttccaatctagatgctttttttttcttgcctaattgttctggcttgcacctccagtacaacgttgaaatttattttattttatttaactttattttatttattttttttagacagtctcactctgttccccaggctggagtgcagtggcacaatcttggttcactgcaacctccacctcccaggttcaagcgattctcttgcctcagcctcccaagtagctggattacaggagcacaccaccacatcctgctaatttttgtatttttttgtagagatggggtttcaccatgtttcaggctggtcttgaactcttggcctcaagcgatctgcctgcctcagcctcgcaaagtgctgtgattacaggtgtgagccagtgcacctggcttccaatgttgaagtgttgaaagtagacatccttgtcttgtttctaatattgagttttaagtctttcatcattaagtataatttgagctgtcccacctctgttttgaatgtagttttgttgcatctgtcattattcttctaaaacttatttttttagcacttgcttttaataattttaataaaatttattttattttgtttctatcagtatatcatctagtacttactttctccactaaatgtgacattttgtagatgtggccatattgttacatgtggccacggtttattcattttgactgttatataatatttcattgtataaatatgccacaacttatttagcctttattttgtttatggatatcttgattgtttttatgttttgctattataaagaatgcttccatgaatatactcaccaattctccctcagtacatttgcaagaatttctcttggaattacattgaagcataaacttgctatgagaattgtattagtccattctcatgctgctatcaaagacataaccaagactgtgtaatttataaaggaaagatgtttaactgactcacagttcagcatggctggggaggcctcaggaaacttacaatcatggcagaaggggaaataaacacatctttcttcacatggcagcagcaaggagaagtgcaaaacaaaagcgaggaaagtgccttgtaaaaccatcggatttcttgagaactcactctctgtcatgagaacagcagcataagagtaactgcactcatgattcaattacctcccactgggtcccacccatgactcgtgggaattatgggacccacagctcaagatgagaaccatatccgaaccatatcccagccgaatcatatcccagcagtttgggaggctgaggtgggcggatcacgaggtcaggagttcaagaccagcatggccaacatggcaaaaccctgtctctattaaaaatacaaaaattagccaggcgtggtgctgggtgcctgtaatcctagctactcagaaggctgaggcagaagaattgcttgaacctgggaggcagaggttgcagtgagccaagattgcaccactgcactccagcctggaatgttcaattttgtaagataatgccaagtggttatcatggccctacaaatttgtatttccactagtaacatataaaaggttttgttgatccatagtatctccattcttttacatagactgtctctgatttttgctcctacaatgagtatacgtcagtatcaaaacttggggcttggtttgcatttccctaatgacacaatggggctgaacatctcgtcatagatgggtttcattcaacattggttgtttcctctgggggggtgttaatttccctgcacttctaagctgcacacatgtgtggaccctgagagctcccacttgtaccagtgaagcccaggagcggagggaaaaaatgcacatgattgttgcatgcaggtgccgttgccttgaagtcagtccaagccctagggaactatctataccagcatggtagaaatcagaggtaaggctgagaagacttaattgagaaataagaggcatattctacaagcctatatttgttgtttccctctttgatccaaaaataataatattttggaattgaacaataagaacacatggacacaggagggggaacatcacacaccgggggaagcgggagggatagcattgggagatatacctaatgctaaatgacgagttaatgggtgcagcacaccaacatgacatatgtatagatatgtaacaaacctgcacgttgtgcacatgtaccctaaaacttaaagtataataataataaaaaaaattagcattatgtgttaaaattgaaagggaataagataaaatttacatacacatacacataaaaacttgatattttatgttagtggctagtgtatattatgtatatatataaaatgtcaatgaataaagttaattcaagtttagtaaaaaaaaatattagtttatcctattatatttaatgataaaaccaacatagattttgtttcagttctatcacactttacattatacattttgattttaatgcttcctttaaaaatcctttattcatggtccatattttcatagtttgctttatgtattggttttccctctaataagaaggtttatggggtatttttagttctttagtggttgccttgtaactatatacaatattcttttatgtcttatttattgagttatgactaagagaccctcaccaagaacaaagggaagtcagtttacttcctctacctcactttctccaatgtcttatttgggtatattatattttattcttttatattttaaatactattcttctccattgattgcttgatttctcagcttcttatatgttgattccctccttcacatgtgagtatttgttgatacttatctttcttggaactcaagctacagtgttgatataagagctaatatatttcttcaattctggaggatcatcagctgataactcttcaaatattccttctctccaccttctctgtttctccctctagaacttctgttagacatagttggaaacccttgttctgggttccacttgcctctaatgcttggttgttttttactccaagttcatattcagaaggtaccgtttcccacctgggaggtacaggtttcacattcacctctgccatagctggaagggtttccctcaatccaggcgggttttattgtaattcttttccttggggcctcatacctgggtccctgtgagtagcacagctttagagacctctgatgttttgattatttttatggctttgctcttatgaagagtgcttccatgaatgtactcaccaattctccctgtgtacatttgtggtgcagatttagagtccagatttctctctgatgtctcctctctcactcatggcctggggaggtaggcccacttttgtgagtggtgggtggtggttttctgctttcattttactgaagggacagcttttccaggctcctgcctctaagcagaaagatgactcatatcctcttttgtgctcagggcctgttgtataggcccccggtccctcatggatactaaaacaggagcattttgtccagctcttatacctctgtgggcctttggcgttagctcctgctcactgctctggctttaagagttttgtttgtttgtttgtttctggcatgggagaatgcttcctttctgcttttgagttcaccaatgtggtcataaatctgcttgggttatatgttagccggcaattcaccgtgtttgtagtgggcatgatggtattggtggaggtggggagggtgcttccccagcagcttggtgctgcagggacagcagaatggatggtgatgctggctggagaggctgcccttgggcctgagcagctggtaagactgctgaattgcaggagtcctggaggagcctgcgaagagaggcctgggataatagcaaggaacagaggggagcagcatggtagcactgggggacttcagaggcatgtggccccgagaacttctgtggggcatgactaatactcaaacctgagtgacccagcagactgggctgtccttgccatggcattcaggaacagccctggtacgttcagctgccttctttgagtagtattttggggaaataaatgaaaggggtctatcttccacattagagaccatccaaaatgcaaagacaaaagtagggatattgacaatttttcagaaacaagaaattgaaacaggaggtgaccttgaatgccaactctcaagaattttcagaaatcttggagaggacactgaacctcctatagggtggaaagtaggtttgagctaagtttactactcaaggggtaggggacccagatgacctctaggttacaaataaccatcacattcctttccttgtttagtatacatggcagtgctgtgaacaaattaaattatccccatcttctgcagcagtgattctcaaccggggatgattttgttccttatgggctatttggcaatatatggaggcatttttgattgtcacaactagggagaggggagaatgttactggcacctggtgggtagaggccagggatgttgctaaacatcttacaagtcacagaacagcctctcacagcaaggaattatctggccctaagtgttaatagtgcccacattgagaaacctttatctaggctcaggtaactatggctcagtcttcaaataacctgtgttaagtcccaaagctagaacatttgcaagaataattatagcttactttagttaactgctctttctgtgcagggaattgttgtaagtacgttctgtgtactgctactatcaccctgttgtatagatgtggaaaccaagaagcagaaagggtcagtgtcaccaggtaccacacaggtgcatgggtcaaactgggacacacacccagcagaagtctccagaggctgtgctctcacccactgggctgtacttctcagaagggcttgaatgtgagtctaggttttctgctctgtcctaagctctattctgtacctcacctccttttataagtttatagctcaagacataggctcagaacacataaagctctgcgtcaacttaaccacgggcaaaaagtttttttgaatgtagcaaaaggggaactttgtgtctttgtgtctttcctaggggaaccctggagccccacggcagatgtcacagattggcttgctcacctctgtcttagtctcctggaggcagtgaggccctgcagctagcacctgggataacagcatccatctaatctccaggtcatagcagaaataatgcagttcttggaaacagcagttgggtcccccagctttctgattatggtggagggagcagcttctctggcaagaaactttggcagtgacattctgggactctttcctcgaagctgagcctgcagcctcctcccccagcccttccatggggtcataatcccctaattccctgcattaaatccctttctggtgaagccagccagagtggtgtctatgatctgctgctgcacgtggactgatatgtggcccaatgagggaaaagaaggaggaccattggaggacattcctctccaggggcaggtcgctaggcaggaacctgggatcctgggaaaagcatgggatcctatcagttttttcctcttgagatccacaaaggtatataggaaaggatgtggagatagccatgggtgatcggggtttctaatcgcaactcttctcatcacttgatgcatgcacattggccatcctgtgccccttccttagactcaggcatccccaacagtcccactctcatctctgacattctgtggcatcgagtctccagttaccaagggagctttttggtagtggagaagcaggctgagatttagagtagacccctctttaaatgtcaccgtgcagtgctttcctgtttaaagggagattgacagccacaagcaacctaatgagattgctgctctgccccttctcttagcagatagagaatctcgcaggctggaaagcaagaggtgccttggggaaaggaggcaggagcaagtggcgccatttaccaactagtcccaggtctgcacccgacaggaggcaattattcacgccaatgcttctgaagaaagtggcacttgagctggggggccctagtgaagcttgctgctggctccccaggaccacctccccttatctctggcccaccgtggctctgagagaaagaccagtggaaagagtggctgctggaagggtagaaagatctcaggactggggcagggacctggttctagtctttgctctgccgctggcttgttgtgtgatctggggcagcccattcatctctatgggcctgtgttacctttacaaagtaaggaaaatgggtaaagggcagggcctatctgctttgtttaaccctttattcccagcatctggaagagtgcctggcacacagcaagtcttcaatcagtgttattagtggaaagaatgaaatggaatctgcagcaatggaaagacagggggatgattttaagcacaaaggaaggccaagttctgtcagttgctttagataaaccactgtggctaccatgtggaggacaagattgagacgactagaaccaggacaactagtaaggaagctcctgcaggaagatctgtttaaaacaagacagtgagctgagtgctataggatttgcaggctagggtttacaccttgcaaatacttttgcatactttggcacatacacacacattacctgatgccatctttacaaaggcctggagaaggagacagggcagggattggtactcggcttttccagacacggaaattaagatccagagtcgtagagtgccttgtgcaagcatgaagctgaaaagtggcagactcaagactcagattgggacgtgagaagacactgaacatcactagtcaccagggaaatgcaagtcaaaaccacaatgaaacactccccatagaatgactcaaattaaaaatactgactatgtcacatattggcaagaatgtgtaggaaatggagctctcatacactgcttgtggggatgtagaatggtacaaccactttggaaaacagactggcagtttcttataggtttaaacatccatgtaccatgtgatccagaaattccactctgtatatttactcaagaaaaattaaaatgtgtgttcacacaaagccttgtttgtaaatgttcatatagccactttatttttaaaaatccaaaaagctataaacaaccagattgtctatcaacaggtgaattaataaacaaattgtagtatggctgcacaatataatattactcagcaatgaaaaagagtgcataactgatacagtccacaaggaggaatctcagaaacagaattctgagcctaagaaaccaggccccaaagactagaagcaatatcatataattccatgtacacgaaactagaaaagtccaatctaatccatagtgacagaaagcagaatgtggttgtctgggccagaggtggagagagagattgaatgcaagggggaaggagggagcttcggggagaggggtgcaggaaatgttctgaattctaattttagtgggagatgcataggtgtttacatttatccgagcttgtcaaagtatgctttccgtggttcattatattaaaattataaaagttgacttaagaaagcagctgactcctcctccagggcctttgtggcttatcctggttccctcagaaccaggaagatgcacaaggcccatggccactcacctaaccagggccagagagcctgacccagagcacctgcagggctctccctgagggtgagaactgctgagccagggggcatcaaggctacttccttagcctgttcctctttacacttccacatccacatgtcaaccttggtgaggaggccttgcagaatggaacagctgtgccatctcctcagagacagcactctggctccaggctcagagatggccacctatccccgaaataacctggtggtattaggggtggctggcctttgctccaggaaggccccatcaacacagaaacaggcaacatagaccaccgcctccattaaccttggctcctaaaggcttgaggccagaggtccaaagtcaggcctggggtctgttgtccttgtaaaactcagaaagtgtaccctgaggcaccagcctttgggaattctgggcatccttccctctctcctgcctcaggtaaatgcccttgcgaggaaagttgcagttaccaacattcacacttagaagtgcttggtatctgaaagaaaatgctccatactcaatgggaaggaaagttccaggaagaaaggagagagcatcagagcacccactggtgcggagtgaggtcactgaggtagaaaaaggctcaggtatgggctggcactgaggtttgaggtgaggccagggccttttggtaggctgcctggattttgcagctcctctgcgtaaaacttctctgcatcctttgacctgtgcctggaggacagaagtgtctcccctcctccagggtctaaggcttgtcaggatctagctgcagctgccctctgccactcttgttcacattgcctttgctctttcctgcctctgtgcctcagcccatgctgttccttccaactgggatacccttccctcatttctccatgtggcagttctaatttacattccagtctccactccagagacttctgagaagccttccctgatcctcccggcagaattaattgttccctcctctgtgctcagagaacacttggcttgctctgccatttatttctgggtttgttttcatgacaacctcctttcacgagggcagaccctgtgtctttttaagttcttatcctgagcacttgtacagactggacaccgaggcaatgcctgtagaggcaatgagtgccctccgtcttatgtggacatctctgtggacaccagcgtgctaggcagacaggccctgcctgcatgtgggcaactgaaccctagccctggggcaggaccctggggcttagttctataagccagactgcacagccaaaaaagggcagtcttggaagcaggaatccgctctgctaagcctctgatatttaccagactgacagtttcccagccaaagcagcccagagacagggaatagctggagaaagtgggtcatcttgactcttattcaaggcaccaggggagccctggggtttagccgtggcagcgatggagactgatcctgtcatttgcttgcatccaaatgaaagggattagtggctgcaccaatatactaattttctatgcaacacagggcaagggcagccagtggagatttaaaaactctgtgtgtgtacatgcatgtatgtgcatacatgtatgtatattataaatacatatatactatctatgcccacatcacatgtacaatgttcaagtgaaaatatctacatgtatctgacaggatggagaaaaggctttaagagctttagagctggaagtctccagtttgagtcccagcattgactcaggacccctaccctccatgagcctcagtttcttcatctggaacgcagacatggtgactgtcctcactggaaggctgtacagaccaaagtgtcagtgagtgtgacagtgaagggacctgctataggcatccacggtgatcttcagaagcagtttctgcttccaagttggatttcctggcatagatcacattcaggtctcagctcatgctcaaggtccacttgcaaatcacacaactccaaccccaaaagggagccaggagtgacattacccctgaaggtgacagatgcacctgtgcatcacagagctagctctagcatattctgtgaccttgggcaacaatcttcccccatcttgtcctcagtttccccacttgtacaatgatagctttggctacctcttcattcttcatatcttagagcccttttggagcagggagggaggtaaagctctgggtgcatgcctgggcaaggatagacatagcagggcaggctcagtggacaggggaatggccccaaagctgggacaaagtcagattgccaaaggcaccacttttatttcatccttcgctaatattctgttctttggcctcacagccaccacctcctcctcccagtcacagaagaagcaactttaaaattaggttttcctcttaacttagaaactaagccccattgtgtggtccatgacaacctcctttatgaatgaaaccagctcataatgaggccctttcccagcatcaagagccaagcccacgccctcccttttctgcttggccaacggcaatggcagcagagcctctttattcatttctcctgctccatggaagggagggggagagggaaatgatcattttcccatttcacagatggacaagggcctccccgccacagccctatggctcccagcatttgagggctacccattacctctgccttacaaagtccttactgcatgatgggacttcagtcccctttcccgtgtcatcctctgccatacccccttgctcctctgcacctagatgggagaaaatgtccatgcttcccaggcagattcttctttatggcctataaaactcctctaactaattctaggctcagcttcaacattgcctctccagtgtgcgtaagtggctccacctctgtcctggccctaccccttggataccatttacagggcacatctaactatgtagttgctcatttaactctctcctgccctgcatgtgggagctctgtcagagcagggcccctgcctcatccctcctcatcccccagccccagcacacactctggacttagaaaagccccaaagaatgtttgttgatgagagagtccttatggtatcagtgagaactgaatactgtggggcttcccgtgtcccaggagcaagtgcaggggcctggcttcattctttgaggatgtctttaaagagtccatagatctatgttgcccccaactccaaagttgaacctatttccagacaccctcctgaatctctcttgattgggacaggatgggatctgtcctagtctgttcaggttactataacaaagtactatagactgggtggcttatagacaacagaaagttattactcacagttctggaggctggaagttcaagatcaaggtggtggcaggtgtgatgtctgatgacagcccactttcttgttcatacattcatagatagcgccttgtagctatgacctcacatggcagaaggtgcaaacagttccttcaggcctctcttatggttgcattcatgagggctccactctcatgacctagtcactttccaaaggccccacctcctaatactattgcactggagattagggatcgacatataaattttggggaaacacagacattgaaatcgtagtaggagctcagctcagtttcatctgggattcctcttgggccccacctcctatccttttcctacaacttttaacccagagacagagagatgaagagaggccaagaaactgagagagggagggaaaaaatacaaagaagagagacataggataagacaaagacagaaatgaagacacaaagagatgagggagaaaaggaatagaaggaaagggagagtgaggagacagagaaagaaaaggaaagaatgccattcagcaggaggagagggaagagcagacccctgggcctgggtggccttgcagccgtggaggggagcccgccagcctggcagccagcgtctgcctcctgcacagggcccagaaagaggcagtagcagctgggccgagcatttggctgtctgctgagcccaagcctctgtgcctgaccttagcccagctgctcaaatcctcctgccctcctgcctgcagctgcccctgcactcccaagacccagaggctggggagtggagagtggagcccgccctcttggtcagctctgtcagagaggcaggagccccatcacatgccaccagcggggcccagccagaaacccattttatttggcttggagatgagacatgtgttttttgtgacagtggatctcctttctagttagaaacttactacgagtaagttttgaaatcagcctcatttcttgaactcagcatacaggaagaacagtgcctcgcgttggtgtggtgcttttcaggtttcaagacacctccgctggtgctatttcttagatgcactttccataacatctccacctagtgggtatcaccccagcaacgagtgggatcctgggagggtaagagacttatccaggcacagtcagcctctaagtggcagagccaggacctacatccagacttggaagtgctgagtttcacctacactgccaccctgactctgtggtccagccctggctggttagttgggggcaagctgtaggtgggctgcaggaataagggtggaaggtgtccggctggggtataaggtcagcgtccttttgctcctattttatggagaccacagtcataaatttagggatgcagggtgagtcagcccacataatgtttaaagcaatgaagatcttttcaaattttttcccctgaaggcctagccattcttcgtgctttactgctcttaattgggatcagagcccagaagcttgctgggtggctggggaaagatagagcccagggacctaaaacatggtcagaaataatcgacatgtaatgagatcagggaaacatttcctcaagttcctctcaggacaaaagctgagctctccatgggtctgagtggaggtggaatgacccaacaggaggaacagggaggggatttgcaggatgggaccaggaaggagaagaaggaggggatggaagaaccagagcttggggtgtttgttggactgtgaggttagtgacgtgaccctgtccttcccacagtggcctcagcacagttacatttatgacatgtgagcttctgggggcatcagattggtctggggatgtttgcatgattcttctgggaaaaagtcaaggccggggatctctggaggattacatgtcttggagttgggggttacagccaagtgtgcctgaatactcagggcccaaaagccctggctgacatctggcttattgatacatgaaaaatatgggcaggatgcagagctggaggcaactgggaatgtactggaggtgaatgaatcaggatccaagagagcctgccaggctgaagtagggctaagtttgttatgttgaaatttacttggtgcaggtcaagatagctcatgaggctgacacaagatcatccctccctttccaggcgcctctaaatacctgatgaagaaaaagcaagggaaggaggagaggaagagggagagagggttgaagccacacaggcaatgaggcaccagagcagtatgtgtcttaggagctgggtgggagtgggagttgggaaggtctctggccctgcaactgggctccccagagagagctggcagccaaggaaggacttaaggtcatccacgtttggaagccagagcctctctgcctgtgggagatggaatgattggctccaattatttagccctctctgcatcgacatgcctgccatggcctcatcgtgggtggaatatttttccatgccccttcactttgggctcagctgtgtaactggctttggacaacatgccagatgcctgaagaaagatccagaaagatggtcagagcctggagccaggctaaatctgtaaggaagaagtctaattgggactggagacttctggccaacatggtggacaaagctaacctgtggtgggcggtggcagtgagcccattcgaggctgggtctctcttgggcccacttgctctctcgagtctctgccaacatcttgaaaggcacatgcctggctagcctgctggtccaaggaggatgagacacagggagcagagctacccaggccgaccatggatgggtattcaaccatcccggttttcccaggaccaaggcatatcctgggacttgggactttcagcactcaaactaagaaagtcctgggctaactgggaaaagcgggtcaccctacccacacacctgcagttagtagcatggctaacccagctccataatctaggagggccaccaagccaccatggcctaggttggccagcacagtgtttattattgtattcactcagattttgtggttgtttgttacacagcaatgttgtggcagtagccaataggtaccttgcccatgagcccagagtcacagtcagaagtgagctgactacaccgatggatcccagagcgtggttgaaaaataaataaataaaattcacttcttaatagatgtagtaaaccagtggctctccatcctaatggcatattagaattgcctgggaagcataaaaaaaagacctgacacccacaaaatagactccccagagagtcttttcaagtcttctggaaaggggtcttggaatcagagattgtatcaaaagtacactgggtgatactaatgtgcaggcagatttgaaagctgatgggttaaatagtaggtgagacacagctgaaagaacagtgatgtttaatttggcaaatgtaagtgtcaacacctgactcaacacataccaactgcccccaacccaggctgggagatgcagtgtgggaacagttcccgtgaagacaactctgagatctgggtggacccaggatcctttgtgtggtcagggttctgcagctctaaagaatgcttaggagagagaggtgagagtcctgccctgcattcctgagagagagctgcattctggaacctctactctaagagctacgtggacagtgggaggtgtctaggccagtgcttcccacacttcatgtggccaggaaacatttggggatcttgtttttgttgttgttgttgttgttgtttttgtttgtttgtttgttttagagatagggtctcactctgtagcccaggctggagtacagtggcacaatcatggctcacattgcaaccttaacctcctcagcctcttgagtagctgggactacaggtacatgccatcatactctgctaattttaaaatttttttgtggtgactacatcttgctgtgttgcccaggctagtcttgaattcttggccttttaagcaatcctcctgcctcagcctcccaaagccctgggattacaggcatgagcaccacactgggcctggggatcttaagatgtagataatgattcaggaggtctggggcaggcctgatacgctgcatttctacatgatcgcaggtgatatccatgctgccagagcattctttgagcagcaagggggctggaggtgaggagatgggacactgagttccgtgaagaaagctgatagccttggactgttcatgcccagatggagaagattcacagggggcctcccattctagaagggctgtcaaggtgtagaggggtttaacatggtccaaagggcagatctggagcagagaggggacatcacacttagatgttgagacaaagcccatgatggaataaccaccgtgggaggtagtgagctgcccatcacagcagggctttagccagaggctcgatgactgcttggtgagagggccatggagaggccccaagtggcagccatctatgcagtcttcaagggctcttcttgcctcagagtcattaatttttgggcgtttttacttctggaagaaatgattcagaataagtggagaacactggggttggtgatgcagaggacccaccacaaggcctccctcctgagcacacagaaagctcatgccctgctggacagccaggcaggctcagccatgcaggttgggttcgctctctgggttcgctgtctggctaggacgagctgtggtcttttcagaatggacatcacattcctggtcagcagaagctatctctttggctaaaccacttagctctggacaaagcaagttccagattctagaaaaataaaattaattgacatttgtgctcagtgcttatgctggtagcaagattctggtctcatgacaatcattgctactgggcaagtcccatccttcttcagtcctcagttttctactctgtaccatggaattggtgtggacagtccctctagctcactttctacagccctatggaaaatatcttcagccgtaaaaggcactgtttagcgttcagacctcaacagaggagtgaaaatttggctgattcagaggaaacaagaggtcagtgtgacctttctctgcttctctatgggaaggagtttacaaccacggtgccaggggcaggaggctgcagatgcagccagcctgtgctgggcacttctgctgccctgggctttgagtcaagcagagcactttagcccccgagggcaggtccatctggagctccagacagcgctcttcctggcttctcctgccaccctttcctctggtccaggcccaagcctgctcagacctcagcaatgagggccagcagggaggggaggcaatgtgggtagggagtggctgagagctacagctcactgtcagggaggagggggagagggagggcccagggcctccaagccctatgtccaacatgcagaatgaagagcaaaggcttggtgctgacttggtggctagggaatcggatgctgtatttgcaggatgcaccgagtctgctcaagtaaccagactccatagcttaatacaataaaggtttatttctggcttacatgccagtccctgcaggagctggtaaagggctctgctccacgtactgtctcagagatccagcctggtgagacccctcatcatctagtgatgctgccattgcaaaaggtggcttaccaaggaagggggagagactgtgttaaaagcatgcctgtccttacacgccctatactcgggtgacacagatcaccaccaaatggccaatagtcactgactaccaggggcaggaatgtcttccgcatgcctctaaaggagaggacaactggattttgtgccacaaaggaacacccataatccctgccatgtagagagactttccactgccaggcagcgtgtagagcatcctctgtgaatgatcacatttacttctcagctggagattcatatcattacacctgttttcctgatagacagattaaggccctgaaatgtgatttcctgacatcatacagccaggatgtgccagagatgagatttgaactccattctaccttattctgttcaagcctaggttctccaacattaaattcccactcaagggaagtgtcaggttcctgacagtttgggagagtccctgggcatgcaagagacatagccactcactcagtttggtttccaggtaggacctcaatcctctccaccccagaaaacagaatttgagggtttctgtagtcaaggagatcctgtatggaggaagccctacattttgagcagggctggcccagcatgggtgagctggacttggaagtcccagactcatttctgccagtctgtcaggtttgatgttgagggtccctcacagccccaccccttgggcagagctgtggatatacctcctgccctgtgtgcagctggcgcaggcatggggacctggtgggaattttggctgggaagggctggtgatggcacagcaggagcagacagctctataaagaaggaagctttggtcagagaattttgggtccagtgggagcggctcccatagcccctcccctggcacacagggcactgcagccaccatgagaattcccgaagctccctgtgccttgagcccaactgcgtctagagctccacagctgcgcctgatggaaaagcaaggtgaagcctctttctgcattttggagcatttctgtcaaaacaaaaggagctggaaaaaagcgaatcctattgaagcccaggcagagatggagtaaacagtgccttttacggctgaagatattaaaaggccacttggtaacatgacaacaggcctcctccagccttccccctgctgttggccgggcatcctcgcctgcctcacttcaccttggtgtttgttgcagttttaaggtgcttctgacgactttatgctcacagtttggcaagcaccactctgcatggatctcaaagcacgtcaggggtcatctccaaggagcagtcgtatttcatgcgtgtgtggactttgctgtattggaaactgctggctgtagaggacctattaaaaacaaatgccctgtgttttcagtctctctcacctgccaagaagttttcttgatggcgctgtcccagaaaaccatggcagatgaggattagattagaataaattgatttagaagtgacatgatgctccttgggagaggcttaaatatttcatacatgtgtatgacacagatttcagctgggtcttgcaggaagagagagggaaatggaaatctcatacccagattcagtgcagccttggactcaggctggtctcctagtctgctgcataactctttgcctcagctgccttagctatacctggggacagtggatgtttagcactaacctcctactatgtttttgaagtccctcaaattggtgagcctgaactagagcctccttcaagggtttcctggagttctgggcagtgcctaaggttggagggatgggtttttgggggggcccaggagggtactgaagctacctgggattcatataccaaatcctctgagatccaaaatctccaaatccccaagacaaagtgttggccctctctcctgccccaccttattcacacgctcacagatggggccgacccttagcactcttctctcggctgctctgatccttctccaagtactgatattcctgcgacacaaaggggatttttccagggcctgcaacccccagtccagtcactgccccaaccatctcccagggaagttacttaatgtggggagaccacagtggcttgcatattgagcttggaaaccacaggtcacttgggatgataccttggcctgtgtttgcactgatgggcccaaaagaagaggatataaagaggaattagggatcgtctctagtccctggaataactgggtaaaatgtcttctgagaggaggttggggggcttctccctgaacccctataaatgtcttcctggggcccagagagagaagagcagagagggtctcctgcaagctgatgaaccaggaagtcttcttagcaaaaagggaatgtcagggcaagagctctggtcttagtggaacctacacatccagttcctggaaggaggagacagccagagaaaagaaggacatggttatttattgccttggagaaaattcatctccaggaacaagtctcacagagtgtgtgaggtctctttgggaagttttgctcctttagggcaaataattttaatatggtttttgaatgtctggcaaatgaattaatgagaaaggatagggggtgatccttgggataatgtgtggggccgcaggcgtctctggacctttccagagatcccaatcctgctgacgggggtcctgagtgggtcctcatcaccactgtcatctgcttccctcaccagcctttagtctcatctcccatgaggcacagattgtggaaactctcctaccacagacaggttaggcgagccccttgctgagaggtcggaggggctagcagaagggagatttgctcatggtttgaaaatgcaaacacatgcttggggaattactgcccatggttagggggatgctggagatgagggggcctttcattgatatcagcaaatactgagaacttgcaatgtgccaggtggtcctgggcactgagaatgtagcatctggcaggatagagctctcgttttggggatgggaaaaagagagagaaaagaaaacaaacaagtaaacaaacacatgaagattatttcaagcattgtaagcactacaagggtagtataatagggtgacatctgagagagaggatgaatgggggtccggctttttttgggtggccaaaggtgttctctgaggagatacatggaacagaggagggacaagagaagacgcagaaaggcgagtgaggagactgttgttactgtccagtagggatgctggtggcttggaccaggaggatggcagaagagatgaggaaagtggacatatatggaacatagtttagaagtgtaactaacaagattgattggtagacaggatatagtgagtactaaaaagggaggagtgaaaggtttcacagaggaataagatttcacagaaaataattctatgtatttatttattttctgccttttccattaatgatttgcagcttcttacaagagaacacagagagtcaaatcaaatcttttatctcaagaatcagaaccaaaggaaaacagcacatgaataaccccaccctagagaccaacagagttaccatagtgagtttcaaatttgactccgagtttcttagcaggtggggaaaaaaagaaagattatatagtcaagataatatttgtgatttttcagagtaaaaatccaaagcacactattttctcaaaaaagagcagagtctcttaacactggagtctgggtaatttttcccaggtggacatttgacaaagaactctgcttgcagtgcagagtgggatcttaaacatgctggtggcacctgcgttatgacattgtacctgattttcctaagagatgttggtactgctaaaatgcagcagagtggggaaaggcattatgggaaccttattacggttcatggaagagggaatgctaaactgtgcttaaaaaccagaggatagaaacataacgaaatgaaacgctgaaaaagtatagagactggaaagtggaaattgccctgggtaagtcaaaaaatcatgtgtattttccctatatttgctttgactgttctacagacaaagtttatttttttctgattcaaaaaattagtatatacacacacatcagaaacaaaattgaaaaatactgaaaagaataaataaaataaaaatctctcccccagagataaccatcattccatgttttatgtatttctcgtgaatcttatgaactcacacatgcacacacatacatacatttgtgtgatgtatttatgctacatttcctttcttcttggttgtacattctttgttttttaatgtttttgaaatcaggatccttcttatagtagatttaatgttttccttttttctgaactattattaagccagtgatgcctcttgatatcaatgctgttacaatggaggaaatgtggtatatagccacaatatcagggttccttgtgcatatataatttggcctcctgctacttccatttaacattcgatcatgaatattgtcacatgccttgaaatattttctaaagatgttatttttactggctatatatattctatcataggatgtcccaaaatggacttaatcctttcctcactgaaaaacaatttctcaaccacataccaataatagaggctactcacacatagcttgaagtgaaactatacagctccatgttacccctgaaaaggggggtgtccgtgtgtccaacaatgaaccaatggtgcagaggtcttgtctgtttcactgcttgagctgtggccaggccatgctgtttaacctcattgggcctgggtttcctcctgtttagcataagaaggctttctggagtttttttctgtttaatggatgctgatagctaaaccttggttccccaaccaggctataggaaaccagtagctttgaggtttgagttgtgtcactgtgaggaattacacagacctatcttgatgctcccaagccctgggggatgctgtgtcctcaagacgaagggcttatcactaccctggcactcagatcccagcctcctctcagaaactctgcaaattgtaatgcagctctgtgggcagagctgctaatacttaccctcaaccctatgtaaggttcagcattttaggccaaatgtagtttcctgatgaaaatatcttccccagaaaagccagagcttgacgtgcaacggaccaaccagaggctgctgggattcccatgttgtgcctggctgcagctgtgggcaggttaccaaccccattgggattttcatccaggcctggaggatgttagaggtggaaagggatttggaggtcagagatgttgcattacttaactttcctctttgtataaaataagcactcctcaaatatttgttgaatgatgagtgactgaaaatgctcagtgtggctgccaagaaaggtacccgaggaaatcagagggctttgatgttggggaagaatgtgatctacacaggtctgtttgtcttgaacatcctgtgattctatgaattgcatataagaggaaggagggaggaagcagttttctcctcagcccctgccacctagtgcttgggaaagtcagttcaccctttggggactcagtcaacaaatgcattcatgcagcagtgtgattcattgagtgctgcggtgagtcaggcacaggtaacaaatctatagggtcaccagggaccagcagtcaaggattcctgccttgtggaatgaagagaggagaattacagatgactccaaagttcctcacctagaaacaggactgcggactcaaggtttcccaggcagattcaaaattggggaagctttcctggaaatgaagctgtggaacagacttcccctccccattgccccccaaaatgccaacctactatgacaaaccaattgagtgaatgttaatgaactacaggtggagcctttaagggtggctttgttcccttggattttatattcatatatgtttttgaagatcaatttttttttttaacggagtctcactctgtcatcccagctggagtgcagtggcgcaatctcggctcactgcaagctccacctcccgggttcatgccattctcctgcctcagcctcccaagtagctgggagtacaggtgcccgccaccatgcctggctaatttttttgtatttttagtagagacagggtttcaccatgttagccaggatggtctcaatctcctgacctcgtgatcctcccacctcggcctcccaaagtgctgggattacaggtgtgagccaccacgcccggcctgaagatcaatatttttgtagcttctaatctcatctcctggaatctccttggggcccctcaaatgagtgttgttgaaggctgatgacaggagaagagtttggggggctgtaaagcactaggatcccatctttcattgacttgtggtgtgacctcaacacatcctcctccactttgggactgaaagtttctcatctgcaagggctgccagtcaggctggctctcaaggggcctacactcaaggattctagggttttggtccagtcatttccggtgtcaaatcccttttgtttataaagtctacagagaagctttgggctgctgagccattggtgttgatccctcatcctttacacacttagtgaacactctagaagactttgccctttcccctacaccaaatagcaaggagaaaatattttagtagtagtggtggtgacactgaccaattaaccttccctttgcaccatccttggatttacaaggcatgttgccatccactgtctcctttgagttttacaaataacccttgaaggagggaagaacagggcatattctgtccattttgtaggtgagggattttaggatcagaaaggttaaggacatgtccaagtaggagtaaatggtagagtgagtcatccagtccctgactctggacccccttctgctcaccttgcagccagaggcagataacacatgtccaatattaggtcaaagggaggtaagcaaagccctgtggggaagggcaggaggtaggagttgaggagagaggaagtgggagtcctgggagggtgcagatctagaaaagccagtgccatagtgccaggcagagtacagggcatttcccctgggggcatgctcttccctcctgccctttgtaattgtgcttctgctgaacttctgcaagacatctgacgttacttttctttctttctttctttctttctttctttctttctttctttctttctttctttctttctttctttccttctttcttctctttctttctttccttcctttcttttctttctttctttctttctctttctttctttctttccttccttccttcctgcctttccttccttccttccttccttccttccttcctttctttctttctttctttctttctttctttctttctttcttttttttggagtctcactcttgttgcccaggctggagtacagtggcatggtctcagctcactgcaaactccgcctcccgggctcaaatgattcttctgcctcagcctcccaagtagctgggattacaggcacccgccaccacgcctgtctaatttttgtatttttagtagagacagggtttcaccatgttggccaggctggtctcgaactcctgacctcaggtgatctgcccacatcagcctcccaaagtgctggcattacaggcatgagccatcacacccggcctgatgttacttttcatggttaccaggtggacaaaacagaggaatgtgtctaaatcctagttaaataaagtaggttcgtgataggttgaacaattccacttgctgtttagtggataggagtcaataggaaaggaggtgtctagtggcctaccactgggcccatcctcagctgtgtcactcactataccacctcctgggaaggcagatgatggtgcacatggcaggctgacaaatgtcatttgaagttgacactaagctgggcaaagctgaggctgtttggaatgacaagcataggattcaaatgatcacatgatgggctgactcaaccaagaataaatacaaggttctgcttgaggatcccccaaacctatatttgaataggaggggagctatgcacatatgaattcccagcatcatttgtggaggaaaaaaggaggcatttaagtttcagtttctagtatacaagaaatgacctgtggaactgtcagaaaaagctatcagcagcatgaactgtattcatagaggtagatattttgtcagagggaggtggtgatctttgtttgttttgtgcatattcgtggaagtgggattactgagttaaagattatggttattttttataactattagtatgtattgccagattgacttccagctggtatgtacccattttcctgctcaccagcaatatacaaagaatgttcctttcactgcattcacaccaacattaaatgttattcttttaaaatgtaagtaaaaaaataaagtcatattttaatttgcatttgtttattaacagcaaggataaatttcattttaagtgtactggttatttgtgcttcttttatgaatcataagttcacgttattttccagttttcttttggagttttcacctttttcttaatgattccagtgagctccttacagatattaactcttctccatcacatttgatgagaatatttcaaagggaaatattttctgcaatttctctttttctctctctggatccaggttcctgaatgcctccgtctcaacttgcatgaaatgtcccgtgaaattcctggagaggcttccaggccatatgctcgcagatctggtgctcacatgtcagaaatgatgtggctcattcttccctgcctctgccaccatatgcatgtgcccctaatctgaccagcagatcagcagcttgggggaggacatgcccacggctggcagaaagctgcctggcaaatcttgacaccctggaagagagaagatggcgatggagattcactttctaagaatgcattcctttgttctcaaagaaaataatggatttggtgttttcttgaacttggggcatttaaatgcatctctaaatcaaactgcagcagagagctcaggttcaggtgatggtctgtcacttacctctcctgtcgccgtggacaggccatctcacctgcctgtcttccatttctttagctggccacttggataccaatagagttgtgcttactgtgcttaaatattgcttttccaggggaggtttgatgactttgtctactcccatactcctcagatgccggaaacgacaggctctgtgtacccctgtggaccagccagattcttgagcagattttcctgatctgtttaccaggaaaatggtatacccagcagtttcggcaattccagagtccttggtggcctggcagtaatggtgtctctccagtcacccagatgtccctatacagctctctacatcagggtttggccatgggccaaatccagccaccacctgtttttgtaaataaaagtgtattggcacaaacctgcatatttgtttatgtaatgtctagggctccttttgtgctacagcggcactgttgagtagttgtaagagagtctgaatggcctgcaaagcctaaaatgcttactatctggtcctttacagaaaaagtttgccaactcctgctctagattgatggttacaaagtctgacagaggatacagttacagggacatggcaaagccagaaaaacgaggaccgggagtccagctttcaacaaagccaatctattcaatctccagactaccctttgtaccaaggttagatccatccttcctttcccattaaaatatcttaacttttatgaaataaacgggatagtagacttgtagttttatttttaatgtccttactccaccagttaaaaagttggccactctatgtagagccccaaaataatttgaaaatgttatccatctgtgtaatccccagatcaggaaccactaatagtctaccttgaaaggtcctttggaagccttccattcaacccatctttttccatttcactacttgtaaccatacttttgccagcagcatcttcatttatgcattcattcattcatttgtatattcattcatatatttacctagcaagataagggctaaagactgtgtcagaggatctcacattttctgatctcaggacccattttattcctaaaaattactgacaacccaaagagcttttgcttatgtaggttatatctatcaatatgaaaaactaatactgagaaatgttaaaaagatttatttaataatgcagttagcaatagcaacaaaaacctactatacattagcataaatttttttattcaaaataactatttttcaaaacaaaaaaatgagaaagatggtattgacccttttgcaaatctctttagcatctagcttaataaaagacagctaaatttttatgtctgcttctgcatccaatctgttgcaaaatgttgttttggttgaagtttgtggaaagaatcctgactcattcagatttgtagttggaaaagagaggagtattgccttttcagataactgtggctattctcttttggtactacactaaaactcaacatgtggtagtctcttagtttagttgtgataagaaatctgaaactatatcaatgaacttttggtacctgatttacattaaattccatgtttctatcttgtactttaaatggaccttttacccatgcacaattttggagtatgatgcattggtcatttagaaaatattggctcactagccagagatgttttgaaatgttggcccatttaattatacaacatccaagaaataaaattaatttatattacccctgatctcatcagaaaatcctgtaagtattgggaaacactcaagctcatgttgttgaatatgagttgtccaaaacgttaagtttctttgggacacttaaattttagctttggcaaccatatgatggttgtttttcttgaagcgagagactccctacatttgattttgagaaagggtcatcgaccagatactgaataatcagagtaatcttaatttgcctatcagtcatgttttcaagtaaaaatgatgtcccacctgggcatggtggctcacacctgtaaccccagcactttgagaggccaaggtgggcagatcacttgaggtcaggagttggagaccagcctggccaacatggtaaaaccctgtctctactaaagatacaaaaattagccgggcatggtggtacatgcctgtaatcccagctactcaggaggctgaggcaggagaatcgcttgaatctgggaggcagagattgcagtgagccaagatcgcagtactgcactcgcactctaacctgggtgatagagtgagtaagaccccgtctctaaataaataaatgatgtcccatggaaaaaagtggctattttagcatgacactcgcagggacctttttttgaggtaatcattgtactgcaggaggagcagaagtgctagacacagactccttattttgttacacaaaatattaaaaagctgtctacccacgggttgagacttaattaatttaatatgttgctctgcttcatcaaggacattgttaagtaccttcttaaagactgagtgcaaaagagtatgatgactaccagtccagtctaggcccgctgctttgattcttgctgaggcaccagcaatttactgcggccactgtccttgcatcgtcaatgcattgcagcaccaccaccagagccagcagcaaatcgcatctcagtaacactgtggagagtctttcacctcgtggacttcttgaaagggtctggggggaccctcggaagtgcacggaccatgctttgagaagcactgtgttggacacagtcggggatgctaggtaaatcagattcaatccttggcactgacgtattcaccatctgatggtacaggttgacacttgacaactcaaatctaagtcggtatggaaaaatactatagggcattattttttattgtggtaggatatgtataacatgaaacttaccattttaaccagttttgagtgtacaattcagtggcattaagtaaattcacattgttatgtaaacatcaccactgtctgtctccagaatatttttttgtcttcctaatcagaaactctgaacccattaaagaataactcttccttctcccctctccccagcccctggtaaccaccattctgtttgctatctttatgaatttgactactctgggtacctcacatacatagaatcatataagatatggctttctatgactggtttatttcacttagcctgatgtcttcaaggttcatccatgaggaattttcttctgttttccctttctttccttttctttcttttcttttctttctttcttttttttatttttttgagatggggtcttgctctgttgcccagactgaagtacagtggcataatcatggctcactgcagcctcaaactcctgggctcaagagatcctctctcctcagcctcccaagtagctgggactacaggtacacaacaccactcccggctacttttttatttaattttttgagacaaggtctcactatgttgcccaaggtggtcttaaaccttgtgcctcaagtgaacctcctgccttagcctcacaaagtgctgagattacaggcctgagccactctaggcagaatgtccttccttttaaggcctgggcaacagagcaaggccctatctcaaaaaaaaaaaaaaaaaaaaaaaaaaaaaaccaaagaaaagaaaaataaaacggaaggaaattcctcatggatgaaccttgaagacatcaggctaagtgaaataaaccagtcacagaaagccatatcttatatgattctacctatgtgaggtacccacagtagtcaaattgaatgaatataccacatgttattcattcatttatgaatatttgtgttgtttccaccttttggctattatgaatcaagatgttaatttttgcaaacctggcttagtcctccagtcagctcctgattattctttctttccttggcaggaagtcacggggtgactccaagcagggccccctttgcattcagcctgcccttctctcagcccaggtaagttcacgttagtcaagaattccagcattctctttctaacacacactgctcggacctgacacccctgcactgcatttccttgttgtttggtctgcgtaccatctataccagagtagattcagcaaacagctgctctcctttcgtttcatttcgacaagtctttattgatcgcgcattatttgctcatcaaacagatctgccgtttcaaacacttacagtcctggagttggctccacgtttgcctgttaaatctgtatttgcacacgttggagttggcagttcagctcaataaagacaaaaaggtctacgtgctggaagtaggtgtcttggtgagagtttccaaagcatggggattttttagactggctgaggcggccttacctaccaaagcctccctaaaccatgtttatccatcatttagatattttattactagatgtatcatttcatccaggatttgggctattgtgctgcagcatccagtcagttgagtgctaaatgacaattgggtaaattagactttcagcaaggagagttgtatgttctgtgaaacatacaggaagagaaattatattgtgttctgtcctctttgtatgtctcaccgaagctccaggaaagaagctgccagccggcactcaccttttaattttgaaacagcccttgactcaccatcattcattggcacatctcattcacacacacttgcccttctgattggaaaagtccctcctgttttcacaatggaaaacaagcacttgagacctactaataatagggaaaatgaaatatctgcctcatgcttcactgtttataaaacccttccaagtaggttatttcatgccatcctcacaatagacttgccattaatgatgtaaagtgatatgtaaatgctcagcccagtgtctggtatccagagggaattctgagtgggtggttgttagggaggcattatcatccccatttatagatgtggctcagagagggtaggcccattaaacacagccacacagcttgtaaagagccatttcctaaactgtaaatttatgtcttgggatgtcacgtttagtgtatgtgtgtatatgtatatatcatgttttgtatatatatgtgtgtgtattgctgtgaacagtagatacataatcataccttccatatgtatatatagagtcacgtttttttttttttttgtgtgtgtgtgtgtgtgtgtattgctgtgaacagtagatacataatcataccttccccaggacctgcccagacatcaaaataatctgatgtactaactgcttttctgttcctgttttaatacgagcctcacaccaatgaaaggacaaggcggaggaggaaagggtaggaaagcagaaatgaatgaagaattctctaggtgtgtggtggtcacacactttacgtaatttaatccttagagcgaactgcaggggtattatttcactgttctataagcaaagcaaatgaggattgggaaggttagaaaacttagtatcacagagctaataagagaaggagctgggatcacaaaccagatgtgtttgatttcaaaattcatgtcctgtccgccatcacacaagctaaactgatgggcttgagctaccaaagttgggtcaagaaagcggcggctcttcaaggacatttggtccaatggccttaccctggactgcatggctgtgagaggctccgggcatcttcatatgttttatgaaattatgcatccatgggagtgtgcccaagtgcacatactccatgggaaggttcagagtaatcgtaagaaaccaaaataaattttgagactcactgatttattccaacactggtttgtaaatggagaaacaggtgcccggggaggggaaaggtgttaccaagctgtggctgttagtgatagatctgggaccccatcttcagtgtcctgactcccaggctacactcagtgccctccctccctctacctgacagatggtaaagcacagagggcaaaggtcaggattttaagagttacctatttggaactggaccggccagatgtccttggtggacctgcacctaagtggcctcagaaagttccaaggtgagcaaccggggcctgagaagggaagaacaaagcgtccactggcatcttatccaggctcaaaggggcttccatttgaagtgtgagaaagggtcggagctttgctttgtctgaaagggcagcctctgagctccgtatctccgaggtttataatttcagcttgtttctcctcccactccgccatgctggtcattatggcagaaagagcacttgatggaagaaagacaggtttgtctttgcaagaacaatttctctgttgtctgttgaatgccacccaatatgataagtgaaatgttgatacttcagacagactccactggtctgggtatttattcacttgccttagttatcagcaagttcagccagctggccaagaagcaggttttaacttctttgacaagtaaggacttgctgggacgtggtaatggaacttccaatgtcattgttgtgcagtcctttggatttctcccagcttgtccccactctggctcaggtttcgtcctgggaggaaggtggagcaagtggggagggcaaaatgaaggaaagctccaggcaaggtggccccaggtcccccaactgctgactcaacgccttacaccaagtgatgtgcactcagccaccaagtccatttagggatgctggttttcaaccatttaatcagtctatggtagtggttttacctccctggggacagttttgctgtgtgtggagacattttcacaagtaggggatgcagctgtcatctagtgcagcagtccccaatctttttggcaccagagccaggttttgtagaagacaatttttccatggggtcagggttggagggatggtttcaggatgaaactgttccacctcagatcatcaggcattagattctcataaggcacttgcaacgtggatccctcacatgcacagttcacaataggatttgctttcctatgagaatctaatgccaccactgatctgacgggaggtggagctcaagcggtagtgctctcctgctgctcacctcctgctgtccagcccagttcctaacaggccatggatcagtaccagtctgcaaccccaggggttggggacccttgatctagcagatagagggcagggatactgataaacatcctacaatgcacaggacagtgcccacagcaaagaattatgtagtccaaaatattgatagtgcgaaggctgagaaaccttggcataggagtgctggctgcatcaaggcatcaaggaaacccagcatccactggccatctgccacgctggttaccaatgagatacccacagcaaaggactatccagtgaaaatgccggtagtgtcaaggtgaactgaacttagggtgaaatcccaaggtgaaatctgaacttaggatgtttggattctaagcatccagctccaatcaacttaagtatcaaagggaacttattagaaggagagaatagagggaaaaactgatgtggctgacctctcagagagcaagagaggggcagctccagtgtggagtgtgcagagacctaagggcaatctcctccaagtgccactgccaggtcagccagtttctgtctatttgccattagcaaagggatgtgaatttcttgggagaatcctgggattggctaggttgaggcttgggtgctggagaggtcagggaaccttcagatctgcatgccaggggtagggggctggccccagagaggagccagaggtgctcagatcagaagggggctgggtgctggctgtgcagaaccaatacaggtccctgctattagcatggcataggaaaggccttgggctctgtgtcacatgactctactcagaggagccaggcagggcagagattgtcaggaaacacttggagaattgaagcagagacacccgaagtggcaaaatgtgctaggatcaatcttgaagagaacatacaggcacttggtagggtggcctttcatttcctgtttttcaacaaactgtgttttccagttcatgttttaatctgacagacatttaatggctttctctggtatcaaggagttgtgccagaacaccgagcctcatcaggggctcgccttgcctgtgaagagcttacagtctaatgagggagggggagagagagatagagagagagaagcagaaaaaaaaaaggagcgggagaaatgggagtgagatgaaagatagcaaagggggtagtgccatcggagaatgtgtgctgggggcatgggagagctgatgaggttggtcagccggtcatggaatgccgggattccacttggagcatggtgattcttcttactgtggactcacccccttagcagcaaaagaggaagacagccacaaggacccgggaagaaagtgctgctattgccaaagatgttccagtgtctctagagcagcattctgtggtgggtgttgtcctgctgttcccatgtgtccagtgtggggaggctgctcccccgtgaccctccaggccccgaggagaggccatggtggtgttggcaggagagtccctgcatctgttccttttatttgttctgttaaagaaaaaggcccactgagggtgtgcaggagatccaatccaccagtcacatggcaattatttattatgaggcttgaatactttcctgattgtataaggttttattgtgtttttatatggagggcagacttggggagtcattttggcagctgagaggaggagggaaaagagctttctgggatcactctgggaattaaaagttcacctctagatggaggttcaggggctaagtgagattctaggggcttgaccagaaacctcgaattccattagtgcttaaccctctatgggaagttaggaggaaaggtattttcccttttctcccaacatgaatcagattttccctctaaatagctcaactgttgggctccgagagaaaagaggtgcactgtgatctggctggggcaaggacgctgctccctctgtgtgagccactccctccccctccactgcacccttggtggcctgggctacctccagtgtgtcacagtcccacttggtggaaagcagaggtctggctcgaccagctctgagtgcctcagtcctgcaggtctgaaacatggtggctcctccgccagactatgaacccaccaccaccttcccagaaacactgctgtctgatgggtttcacttttgcatcgggtttgagctacatcaaggacccaattcagagaagagcctttttcctaatacacaaacacacacatgtgcatgctagtgtgaattccacccatccttcaaggctcaggcctcccctctcccatgaagctgacaatcaccacccccagcttctgctccttctccccctgttccccctcctcctcctctgtctcctcctcttcttcttacttcatcaccactatttactgagtgcaaaccatgtagcaggcaataggctaagtactttaaagatactattaatatctttgttaatccccacaaaaaccttattattgcctgtactttatacataaacagcctagggctcagaggagttttgctgctcatccagggtcacacaggtagcaagtaatagcaccaaccgttgaacccaggtaagagtgatgcacaggccatctcggcctccggactagactccagtgacctgcacctgcgctggttcccactcccgagaactctctctggatgtcttgcatgcagtctggtgctgctagcagccacgctctcccctgagcaggctgcttggcctcagcagaaagtgcatggaaatccctgtttcttcatctggctctggggttactttatgtgtgaccttgggcaaattatgctctgcttcagctttctggactggaaaatggaaataaaaatacttaccttgcagggttgcctgtgatgctcaatgacctattacatttgaaagttcttgataagtgagagatataaaatatcattatttttactatgtcctgtctccagtgccactaggcagggtcacaagctccttgggggcaggccctgtgcaagtgcctcattattcccacagagcttctggccagtgctgaatatataaatgacacttaaaacaaaggggttgacctaataaaagcaccttgtttataaatgtgctttctctataatattgccaaattgccctccatagggcctgtgccactttgtacctggagcagtggcaatcaatgagctctactgtttctgtacacttccctaacaccatgtgataaccaacattgagatttttgccaaccctataggtaaaaatgagcatctcagcatgatttaaatgtgcatttatcttattatgaattaggtgaagcagagtttcatatatttaacagccactggtatatcctttcatataaatggctgtcaactgtattgcactgttggtcttgtttcttcctcattgatctgtaggatatgtatttgagggatcaaggacatatcatttgcaaatattctttcctagtttgtcatttgtttttaactttatgtatgctgtaactcgtttgagaacatcagcaaagagaagccagcacataagacctggtggaaatttaggagagtccacgtgagctcacaatgtgcttctcgcgctgagtatgtgtctgtgtgccaagagaaatacagagatgcaggacaaatgaggtgaaaactttttttacagatatatttattaacttacactatttatagttaaacaactatggatataatatagtatggaattcaacatttgtataaattttttgagtaaagcgttgaaatgtcaaagtaatggcacacctgcatctgactgctttgggccctgcccccagacactcttttaggggtttttcagtaagaaagtttgaaaagtgctgccctcatgggaatcagtaagctcaagttcttatctcagttttgccctaaattatctgtgtgacttggatgaatcatggtaggtgccataaatgtcataaacttcagtggtgtcataaacatcctaagccagaatagccagtctgtgggcaggggttgctatttactgctgaatcctctgtgtctgggacacatacctggtacatagcagaggctcaataaatagatatcgaatacaaataaagcgacatgctcaaagtgcactttgtaactgtccccagagggacagttttcagttctgtcagcatctaaagggctggcctactctatgtaggactctgggataccaaggtgagtgaggcaggtccctgtccttccccctgtccggaggaagcagacacatgcactctggtgtgaagacgctgcaggaacttcctggctccatgcccctccccactccattcttgcctgggtgttgtaggacactgaggccgaggccaagactgacaactttgccatgtgtatcgaagatcaccttattcactcttctgctatctcaaacccctacccccattttgtgggggacctggggtggtccaggccctgtgagactatcagcaaaagcagtcttctcacatcatggtggtcccgacccctgtcatgcaccctgccctaaagacacatgatctgggctgtttatggggtgtgggctctgagatgtgggtggcagctcctgggccatcggcaggcagtaaagtctgcagtgcaggcctgttttccagctacagctgccacatcaaaaggccaaactccctgcaaactttgccttaattaaaaagttacggtaatcctcaggatagaggccggttggacacccctggagacaaaagttctctctgtggccacggaccaggcccttccacccaccccaggcactattaaaagtgggaccacgctgtgggcatcacagggtctggtgaaataggagcggaaagaccctcttctttctccatactcataatttgctttggagggctctagagccaaacatttgaaaaggggctctggcttcttggacagatttctcattctcacatgcccctgtatgctttggggtctttcccagctgtgttttcaaatggctcaagcccacggaggcaagtgttagagagctagggcctgtggaacacccaagtcccattccatatctgtagtcagcgtggtaattcatattttcattttccccatgagcaaaatgagccctggcaatggaaaggggcttgcccacagctacccagtatactgaaggccagcaccctgctcacggtcctaactgaatcagtccactgttatgaaagttgcagagatagcgatgttcactggactatccatttgctcctccacattccccagacctcttatacataggcagggtcatgtgactggccagtgacatgtcaaccagagtgaaatgcatccgttcttctgctgcatggaaaagcagatattggattctctagcctctctctgtctcactgccaggaccgatgatgacagtgttccacatagtgaagtcttcgtgggtttggggcctgcataagtgcccctctctgctacttgtagtgaactcacattacatatttttgctgtgctaagtcacagagctttttttcttgcagcagagcaacctagcctaacctaagcaatatgctatttaacaaattagccaatgagcacttggtttttactgactcacttgttcatgagggccccgaagagtccatagataaccaaggagaagttgaataaaggaagatttcagctcaaacataaaacaatacttttcacagagtcatgtggagatgaatgtgctgcttcaggacatggtgccatctctacttttgaacagatttgtagctgaggccatatggctttttgcaggaggatggtggagtcaaatccaatggagtggagtgaagatttatctcctcgtgctcagggtctcctctcccagcaattcacatgcatgtgaattccaaagagactccatctctgcaggatggttcttccaaatattctcccctgggcagatggtttttttttaagtgtcctgtatggcacaccagcaagttagaaaagcaaggccgggtatcagctccatatgccccttggctggcatctttgttcagtgcagaaaccatccaactgtacatagcagcaccagatactgggcaccatctcagcaccttatatatgccatttcatttttaaactttctaccatagtccagcaagatgggcactattatccccatttaacaaaatgagaaaaccaaagctcagaaaatttaagtaaattgcctgaagtcacatagctagtaaacagcagagttatagttcaaatctgttctatttgcttccatgcccaatgccctttctatcactctacagctgcccccattcaagctgggagtccatgcccaaggtcatatcatgggcaaagacagggcccaggccaagggtactggaatcctaagcccagaacaccagctccacagtcctacccagaaaagtgaaatttccacaggtgtgataaacagggactatttacaatgctctgagtcttgcctcagtggaaatatttaaggtagtgtcaaaacaaaatctattatttcatttatgaagacattcataggggctggggaaggatgcaatgaaatatttgcttctgtaaccaactggcattctcctgtttcagtccccaagtatgtctgaggatctgggtcctgagtgtaaaataaaacatacttaattttctcaaatatcactagttaggaaaaaagcaaaagaaaagcagagtaatttccttcctcatctcctgccgcaggtgattggattgcaggattgcatggagggagaagtgattttgtttcttggatggtgaaattaagtgagcacttcccaatttattcctaaaaacacggagacaccgcgtttatgttcctgaaatgagaaatcagtagaaacacaactgggtaaagaaagggaaattaaaaagaaaatcaccaatcatttgattatatgacaacacgtgaacactcacatacttgattgtactctgcaagtctgtagaaaggaggatcatttaagaaaaaaaaaaaaagacgctggtttcagcatgttttttgtaaggatgggctatggcagctggaaagctaagtgtcctgaaacaatggatggccctcacatttgtgcaaggtcttcagagtttacaaagcgctttcagacgtgttgtatttctcctccatgtcctggcttatgccaggctctccagctcccctttcaacccaccctccctgttcctgctccatgctttctgtacctggaatgccaaactgccagatgtctcatcccctagctgtgccatgtgcacaggtgcctacctacacaggaatctgcactgctgcttctcagccccatgcctgggttgcctccgtcatgccttcctcacctttaagacttccatcacctctggtgccgcctcctgcagccttccctgagtgctcccagccttgcctggccacccttcttccctgttctcccatgccctctgtatctctcagtccatgcagtcaccaggatctgaatgttgaccttgctcctctcttggctgagtgtcccctgtagagcagggaacagcttcttcctaggcagacactggacccagcaaagagcgtggcttagagtctgtacccaagaattaccgggcaaatgaatcccctgagggtgtcattgtccctattatatccaccaagaagctgagggtcctgagggctgggtgatatgttttgtgtccccagtgagttagaggtggtgcctaggctaaagtccaagttgggtaattcctggcattcctgtttgctatggaacacgaattagatgcctcgtggaacacagagactggggtgtatttgaggttatgcgtgttggtgctggggcttccttcccctcttagaagcagagttgtcttgaagttaaaaaaccatgtgatgtggccccattgcccagtattctctgtattggagcggaagtacaggataagagtctccactttatcaatgcttatggacttcagagtgaagagatcaaccaggaccagattaaaggaaatacagttaaaggaataaagttatgtcaactcctttaattaatgtgtacatttatagtctcaagtatacagacactttctatttaaaaaataagatgaaattatgaaagggataaaataaaagtcaaaagacatgcttcaaggaggaactaaataaaatagtaagagctgcctgtggtggcaaaaggaaacacaaaagagtgaaagaaatatacaactcaaatgaggatttgactatatacagctgccagaggctgccagtgaatggctggtcagcagcattgctggccttcctccttgcaggatgttcttgtataaatccagcagagccttggtgcaactcacttcttctgaatgcctactatctgcatgcccctgaagacacaaagaaccccagaaaaatggcaataaaacataattaagaaacaccaggacaatcttcactgcacagtgggagcccagaaggaatgatcatctctgtctacaggaacttgttcccagagcaaacaggcacctgagcaacccagatgggtgagggtgacaggtggagagatgggagaaagatctccagcagaagcagctgcacaggggcaggcagcaaagcccagagctaggaaaaggtgtgagtcatacgtttgcagatctgtaagaagtttattatagctggaaggaaaggctgaaaaaatggtgttgatgctcagtcctgtttattgaacacttagtatgagctgggaccagaactaatgcaccattcactggcctcaccatcacgacaacaaatgaggttgccactgttactaccccctttttggaatgagaagattaagtcactgaggtggagtaacttgcccaagatcacaaggttggtgtggatccaggcccatgtccatctctgtaaacccatgttctagatagtaaaatgtctcccatggtgtatcagtcacccatggctgtgtaacaaattaccccaaaacttagcagcttagaacaacagttttaaggtcagaaaaagtttaaggtcagagtctgaaatctgggaggggtcttactgggtggttctgggtcaggctctctcatgaagttgcagtcaagatgttgtctgaggctgcaggcatccaaatcttaatggggctggggcaccatacatcctagttcacttggtggctattggcagaaggcgcctgttctgcatgatgtgggctctccatcatgcttctgacctggcagtgtgcttctccagaacaaatggcccaagacagcaagcatgaccaagacaccaatgtcttttataccccacccttggagtgccacacttctgctggacgcaatcagtcacacaaaccaactgtggtacagatccggggctgaatgctaaaaggcaggggtcctgggggccactaagaggctgcctcccatgcctgggcatcctaaactatttagactttctgttcctacaagaaatgggtaaggggggattgggatctgaagtttcggttcctccagtgggaattccaggggccgaatttattataaaatgcatgtagagaggcccagcttgacccacagtgagaagttcagctgctttttccatccaaacagcatgtgcagtagaatggcccttcccctccctgatggctgctcgactgtgcagcaagtctgtcaaaagatctctgcacacactaggtgctctgtgttgtgctggctgagttgaatctggctacagctgcagctctggggaccctgggctttgcagtcatgttcagaactccctcagacccatgtgcccacttcctcagaccagctcatatttaccctctgaggtggtcactgacacagccactgactgcccttctgagcaggggctccctgcagatcctcagcatgctgggtgggcatgagcaggctgctctgaaaagcttggcttccctttctgaggattttatcagtatataaaaataaacagagttggctgactccttgatgtctcagggttgcattttaattgctgctgcttccgagaagacaggccagctccacttcctggtagacgcccgcactcacaggaacagagctgaactctgggtgttggggccagagcatcccagagtgtgactgactggtttgcaattagcacttcattagagggacacctctggttcacaggaccaagactggctcacagagcctgcatagggatgaacatctcccgcctgcccacagagtgatctttctagaacccgcctctagccacactacttcttgtttaaagttcttcttacccctccctgccttaaggaccaagttcaaactctcagcccggcttacagggactgccacaatctggcctctgcctgctcctcagcttcatccacgccctcaccccaactccctggccctgcttcctttattttctactgcagtcagattcaactactcgtagctggtagatgatcgatgctgtttttcacctcatctctgccttgaatgcccttcccttcccaaataacatctattcctgcttcagaattaatcttccccctcctgtctgttatctgggaagctgtccattagccaccctgagctgaattatagtctccttttcttgcttccacagcagtgagatggtggtgctgagccctgaacgctgtctgcttcctagaagtccctggcagcgtccccacccccacggaaccccctcacccatgttcaggaaagctgccttgtgaagctggtcatgtgggatgtcacctcaggagggaggagtggcctgcccagcacagcccgcagcagctcaggcaaacacagtgcacctcacttgtctgcatcaccatggcccctaggagtgagcacgagcttccacaacctttgctgacaaacaggggttccgcccaacacagccatgatgcctcaacatccggagagaccctgccttgtatcagcacaagactcctgggtttaatgatgcttgaccctagcttctttcaagactttggtcttcatttgtgcatctgcagggagcagggagcatggagggaacagcaagggctgggagtgggtaccaagtcaaattccagcaccacaacagggagcctcgtcttcagccagttcattcaactcagggggcttcagcgtcctcactggtccagtacaggcaacattccccctggcctgctgtggggtaacaggaaaaaacatggggtgccgccaatgacattgggagatgtatctgggggtgaggttctggagagcttcaagccctgggggatttgggtcttgaaggcacactgtggacctggagcagcactagccctgcatggcaccaggaccctgcccctcaccatgaaccagaaccctctccctgggagatgagttctcaccagccagggctgcggggttgggggcagaaagcaggagcagcccctaacagctcagtagacgacagcttctgggagcctttttcaccaggatctgaggcctgtttacatgggtcccccctgtggtctctgctgcttaatatgccttttgaaaatgatgctcagtgggatggtgtgtgcacatttgtaattccaaagagccggctggtttttcacaatctgtgcctgctaatttctcagtcacaggaagggaaatagcaaaaagtccccaatactccttgttgagtggattccctaatagcattacgtagtgcttcctatttacaaagcacttttatttctctcaatgagaaaggcagacctactgctataagcccagggggaacccggcatccacagaggagaaatgactcgtccaaggtggcacagtggcagtgagaaagaagggcaggcacagctgcaccccgtttctcctgccagctaagtgcatgccccttcatagcaacctctggcatagacagaaggagagatgaagcaagaagttcccagaatgaaggctgtttcccctaagaggtgggcgtcctgccacaagaaatggctcatcgggaaacactgagtgaaaacccacattcagagcaaggcttcccagtaactgagatccagcctgaggtttccaggagctgagcctcagatggaatgagggcgggctcagagctcagccaaccctttgaaactgagcctgcgggtgaagtcaggtcaatacattcacaggcgtttcaggccctatcgacgtctggggtgggaaacccacccgaaagctgttgaaatacaggggccagcactggttctgcagaacagtggctctttgagtggaaggtgttcgagaattaagtttccccagtgttcccagggctcagactttaagccaaggggggctggggcccccagtgcctgatggagccgctgataggtccctgctggctaaaagtgatgacattggcaagaaactgatctttctggggagcagaaactcaagagcactcaagtgaagaacacaaggcaagttgtgttacctgccacaaagccccagctttcaggaccaggggaggggtagatggggaccacttggtattgggtatcaggagacccagaccagaccctgaaggaggaaacggctgaagcgagacctcttatcttgtcttgcctcctccttcggcatataatcggaacgtgcttaggccagaggcaagaaagcatgtaatccactacctccctctgtgtcatagacaggaaaattgagatcctgtggcatcaggagccttgttcttgggtaacagagtgtcagacatgggactaggaagcaggcctccagattccccgtccactgctggtctggacttggaaaacaaacaaaactcaaagcctccagccctttgtcaccatgcagcaggccacagccacagcacacctccatctggcctcctccatatatttttcgtgagcccacagagtgctgttccctgctgtaagctgatgcttgcacacaaatgtctggccaaagcagtttttgtttaaaagctaagtcagtttgtacaaaagcacaccctgcctggcatggctcccttagcacattcccactgctagtcaatgcctggttgaattgtgaagaccaaggacatgcaatgtaggtgtcacctgtgcactactggagataaccccggggcggggcagctgctgacctgggctccagaatctcaggtgcaaaatgcagcttagatccaacagggctgagatagacacaaagagatgcaaccctgaagcatggtggtattttaacaaacatgctgtacactggatggcttataaatagcagaaatgtatttctcacagtcctggagctagaagtctgagatcagcatgctgccatcatcagattatggtgagggccctcttcctggttgcagacaaccaacttctagtcgtatcctcacatggggtcccttttataagggcactgattttattcatgcaggctgcaccttcatgaccaaattaccgcccaaaggccctgcctcctaatcccattacactgagtggtaaggtttcaacatatgaattttggaaagacaccagcattcagtccataacaggtggtccacaggtaggcttgagtgggctaagggttggcaggaagctgctggaattgcagggaagacttcacccatattcatgcctgggcatttgtctaggaagggtgtccctggcatttgtctaggaagggtgccgtctctgcatcctccttaggtgtctcacagtgacctggtcccacatagcccagtctgagctcaaatatcctcttctgacttcaaaaacgtaagtgttaagagtttctgtcatgcctaggtgaccttggctgctaaaaactcagtatcattgttttctaggaactctgtactttccataggatgtcattctgttttgtgctacagcaatggagatgaagagctgcagtggaagcgtgagggcaggggttacagaaaagaggtataaattctcttggctttttttttttttttttaaaagcttttcttattgaagtgcaacctgaaaaacaagcccccattggagagtgccatgacacttcctgtgtaacgcactcaaacgtcccttggcaactgggagctggggaacctgataaggtacaagctacagatatgcctgggagtttgtaggagtagcaacattttgtcctcactccaagtctcagtcaagaaaggacttagaattttaaaataaaataatgattagattggaatcattgaataccagatctaagaaaaaacctcagttttctccatatgaaatgagactttaggacttgcccacagaggtgatgtggaaacccaatccttttgactccaagtcaaatgcctacaaagcctccctgagaattgggccttgagaattgtaactattcatattcttgttgggataatcactctttggcaatggcatcatggaatcaatctcataaatgaaatattaaaacttcccattttcttggctagattttgttgttatttcaccagaggagagccccaaatgcaacctctttgtataaacgtctttcccagggaccagggtaaaggtatttttttctaaagcacttggctgcaaagcaccttagaggcatagagaatcagtactttggaatacctgaaagaccacctaggcaagtctttccattttgttgcagggctttctgaggcccagagaagaaaagcagctcaaacagatcaactgtatccatccaattgtccctttcagaaagttgaaataagggggaaaaagagaagtttctagctatgatgggcactggggtttgaagttcacacagccttggggagctgggtggcagttattttattttatctttaatttttttgcgaggatgaataacctgataagtaagtcggtcctcagagggtggggagtggagcaagtgagcagatggcatttcttgccctggctttcctgcgatgctttagaccctgttttattcaagggaactaagttagttgattgaaatctaaaggagccccaaccagaacaaggggattcaggtatgcacaggagctggagtgtacgacctctgagaaccctttaatcagagcagctctgatctcaggagtcttaggtttcagggccaattgcagttagtgagacccacgctaagacaacttatgccaattccactggagttaaaggtggcctctgggaaagggtcttttgagctccttgctgtgcataagatggtccatagaccagcagcattggcatcagctgggagcttgctagagatgtagaacctcagccctacccagaccctctgaatcagaatctgcatttttgcaagctccccggtaattcctatgcgcattaaatttaagaaatgctggttaggaaatagcattttttggacaataaaaaaaaagatggagtggagccatgaggagctggtggtaataccacctcacctccagaacaaactctccacttggccttgggaaaaccgtggccatactcagaatggctgctttctcatctgaaaatgagggggttggactggataatctttattctctaccctcacaggcatttctcctatgagctgaaagggggtagtcctgctcagctgaagatcagagagcttcttgctgtgtaaaacactccctaatcagccttatgtcaagtcccccgccccccgactaaccacagtgacaagtctcaagagtgcaccttgtcaggctgtgaataaagttcaggcagtttggttaattaccctgacaccgactagagttagctacccagcagctcaggaactcgtcttaatgattataggaacacacacaccgcagcttcgggcacaacctccccctttgcagcctacagcctggttttggaaccacaagttcaagcagaacattcccaagggcatcaggggtctagggaggcatcaggaggtccccctttcccattccaacatgggtgtgaagtcattttcccaatgtgccatagtgaagcctggtaagcataatagccatctcagtttctctctcatgcccctgcttggaacctgcctgtggtgctccactgctgtcaagaaaaagccatgcaggatgtgcccctcctaattctccacccacatctccattaatccctacctcaaaccttctgccctggccccagagggctactcttgggtctccacatgagccatgtgctttcttctgttgcacatgttgcttctgctcaaagcacccttctctgctcttgaccatgatccttacccatctttcagattttaatatctatatcacttcccccaggaagttttcatgaccctcatgaccaggttgagtgcctatctttccatagagtcctatgctacatcattcataccagatatcacattgcattttaagacagcttcctccagcagtagtgagctgtgggctggcagtgttcatacccgacttacgtaacatctaagcctcatgaagacagggattgttttttgtgtcattgacaactgtatccagagtgctcagtacattgcctgggacatataagatgctcagtaaatgcctaaggaagggaggagggaagaaaggaaggaggaatggatggaaagaggaagggaaggaagaaagaaagaaaggaaggaaaggaaaaaatgaaggatgggaagaaaggaagcaaggagggaacaaaagaaggaaggaggaaagaaaggcaggagaaaaaaaagagagagaggaagggagggaaggaagggaaggaaagaggaaaggaagaaaggaaggaggaaggggaggaacgcttatgcttagcatgcctcgtgtacaatgagtactcgatagttggtttgggagtgactgcatgcatgaatggaggcctttctgcttctggcataaagtctggagagtgagagctcattaggagggattgcttgacaggctgaggcagaaaagtgttcacaaggcccatcagctctgcagaggtctgacaccaggtgaggagataagacttgtcccctgactgtgggacgtgggatgagaggtacagaatggggacttccatgagagggtgcctttgagtgaattaccagggagaagtgtgaggacccctgtccctctacccagagcacacatcacccctctcctgtgggctgtctgtctgaagatctagaaggccagttccaggtctaggctttcatctggactgagaggtagaagggaagaaggagtttctctaggcagggtcttcagagaggagaacactttctcagttcccataaccagtaaacggcagagctgagattggaagccacctccaaatgggcctcaagcccacggctctttctaagcacgatgctgtgtaacaagcttgggagttttatatttttaaagcaaagcccatttaaaaatatctatttctttacatgtggtggcagcagtgggataatagtcaaatgtcaataagtagaaatcgggggaaaagaattggagcatttctggaagaccttcctctttctctaagccattttggttccagtttctcagctatttcctcagggtcaggggttggagaggaaggtttatatttttttaatttcgttaaaggatggaaagaggaagagaaatgttccctccttccctccctccgtttcttcttttttcttctctaacaacccattaccctacccaggtagcatcccaaggagctgtgctggaaggagctcttttctcctgtgaccagtggcacagaacagagcaggtgggatagggtgaaagttgagcatgcaggtttggacgtcagacacacctgggcttaaagccagcgttaccatttatgagccatttgatctctgccaagtagcttcacgtctctgagtcttcattttctcatctgtgcattggtaacaataatagcattaatcacctggggattttatgaaatagtgagataaatacaagcaaggtatttagtatggaatcacaatccctagccaccactccaaaattagaatgttctaaaaccttaaggcatttaaaataactcatttggcagtaaaatctgacatcatgtaaactcacttggcaacaaaatctgacctgaactgatgtaaactatttggagttcttattgtgactactcatatgttttgctgtagaaatattgatgtgtttgattatagggtgatacctcagtacttcctggggagttaggtaacatgagctgtatgtaccatatcacctttctaaaatctagagtgatttgagtttcaaactacagatggttccaaagattttatacaaggggtgtggacctgtagaatacctggccatggtgactgctcaggatttaagagccaccatcccttctgtttctgggatctaacaatccaaggtacaggggtgtgaacctgagctttttaggcgtgatcagagagctgcttacataaagcttgtgctagacacaaggtatctagacacctggacacaggtgtttgttaatccagatgctcggactcaaccttcccccattgaactaacttctctggcagctggaacccagcactttgaacgtgctccccaggtgactcggagatctccttctacagcctattatgaaagttcagagcacgatgactactagcagccaatactaactgaggaatttctcctgtccagggactgttctaggatataacattagtcaatcctcacaagttcagtgaaacatttttctccatttttcagataagagactggagacacagagaggctccagaacttacccaaggtcacacagcttctaaatgggtgttgttggaacctactttcagagacctgattccaaaaccctcactgatactttccgtgagtccagatgaagagagggcttcaaggaaaatccattcagtgccaggatgctaccagctccctggggcatgggactgccatcctctcctaggcgtctgtcctgatacttccaatgtaagtgtggaaaaactcaagtttcataagttttgctcatgtgctctgccttggagagggtgggaagtagaacagacactggcctcatgttttgctgttggttacctctcaggcatgtgatccttgtaccggaggtttcacatcacgtagcccctgcacagctgatctgtgaatgggaaattgggttgggccatcaccaggtccccttccagttaaatatttgtcccaagtcccagatgatttgatatgagagccccatgcctaatgctgtttgtggattcattgaatcaattattgtttcgttcattcaattcattcaacaaatagcttctctgtgtctactactatttgcactcaattctcagagaagtaaatgtctaaagtacccacttaataacttaaaagctgattttaccaatttcatttcactgtaaggcctcccaaaggattaacatgttagtgtgcaccccctctcgcaccagcacacttgcccacaaaaccgcctcccattgtttgaagggaaacctacaagtggatccctgcccccacccccacagcactttctaattcaaatcatctgccattcactggctttctgccctggggcaaatcctccaccttcagtcctactttgatcctctagcccaggccgctttcatttcacagttgaagtaacaaaggttaaaacagatgacaactatttctagagagctgggttttttgccccctcaactacgcaccgtggtgaggcgccgaggaggccacatcacaaggctggagaaccctgggagcttggtagtgttggtgagcgagggtttgttcttctctagcccactatcctaaaggctgacttccctccaaggactgaacctcgaaatttacaatgcagggccccaggggctgcggtggggaagggcctttcactattgctggcagctcctagggcattttcctggactttgggggcagattactatgaaactcctatctcatcctgcaggttgggaaactaaagggaagttctttgtccagggtcagagcatgtgcatgggcaggagggaaggtgggggaagcagggagtcagtaaaggaaaaacaaaccaaaacccaacaaaacagagcccagtgcagtgttcctcctgggggtagccctttgatgcatccctggtacctaagaagctggctccagccaggcctcacctattagcctcagggaccattctccccagacaaggtctctgttcactgggccatgccattttcttctcatccccctaccacaactccacatacttccttagcattgtcttttcctgaattaccaaacacagcagcctgagcttcaccggggagctgggagctggggacatgttcctgggagtctctagatggatggctttgagtttttccagcagaagaggagcagccaaacccagatgtgagggccctccccctccaagttcagcctgccctggtggcttccttcccagagtcaggtcttctaaggagtgcttagcaagtatgtcagcttccagaccaaggcctgctgttcttggctccgggagatgtttttcagcacagtatgcttgctgtagactgctctgcaggggtgggggtgggagggtgagggcagacctctctactgatcagaattcagagtatgactcctccaatctgtccccttggtgactttacatgttctcaggacagctttcagaaagcctcctgcctgctacttgcacttggggatgtagggggaggggtcagcagtcgtgcggggactatatgtggaatttgttgagatcaggcagaaggaagtgaagacaccctcttctgatttgtgacatgtgagaacattctcctgacagaagcagctcccggtaatagtaacagcttccgggccctcgacaggctgcagcccatcaccttcagcgtcctgccaagctcagcagcagcgtggcaggagggggcagagagctgga

SEQ ID NO: 325 - DNA, 179196 bp, Homo sapiens
  source 1..179196: mol_type = genomic DNA
gttataatgtatttacacatctacttaggttatagttcactatatccagaaacctttaggctgaacctaaaataggtgaggaggcagcttcaggctatgcttaatttaacaacataaagagcttatatttgagttaaacatactaagcttatatctcaagtatgccacttcctttggtaagaagcttaaactttccaaggctctgttttctcatctgcaaaatggagataagacttgtacctcacagagttgctgtgtggattaagtgagaaaatgtatgcttagtgtagtttggctctttactactcacattaacatattaatagaagaggataaagtatgtacaaaatgctctttctaagaaagaagacacattttagtaatcagaatggcttaaatatactttaagccaagggtccccaaccccagcgccacggactggtactggtttgtggtctgttaggaaccgggctgcacagcaggaggtgagtggcattatcgcctgagctctgcctcccgtcagatcagtggcagcactagattctcacaggagctgttaaccctattgtgaactgcgcatctaagggatctaggttccactctttaagaaaatctaatctgaggtagaacagtttcatcccaaaaccactcctcccactccccattccaccactacccccacccccaaattcccccactcctccacccctgttctgtgaaaaaattgtcttcctcaaaactggtcctgctgatttaagccttaaaaagagtaggttttaacattctcatcttgaataactcatgcgctgaaaatttgggttacttggagtttgtaacactttaattttctctttcttttttttttttgtgtgtgtgagatggagtttcgctcttgctgcccaggcctggagtgcaatggcatgatctcggctcaccgcagcctccacctcccgggtccaagagattctcctgcctcagcctcccgagtagctgggattacaggcatgcgccaccacgcctggctaattttgtattttagagacggggtttctccatgttgatcaggctggtctctaactcctgacctctggtgatctgcacgcctcggcctcccaaattgctgggattacaggcatgagccaccgcacctggcaaattttttgtttcttttatgcaccgtataggggaagaaaaatatctttttcttttaccagtcttggattcattggctggggccctttacaagacagatgcacaagacaaaaccgtacaaatttagttaacgtaagttttatttgacacaggagccttcataaggaaatgaagacctgaagtagctgaacctgagtgtttttattctagttttgatgaaggggaagattgtagaagaatttaataagataaaaagtatgagctaactgtaataaactgggggaaacttagcaaggcctgtttgttcacattcttcttggcgtctgtgtctatgttcctttcctcccagtgtggggagggtacctctcacagaagagtcttatgactggcatcaggggaaggtcaccaagtctttcctgtacatgctgtttatcaaattcattcatctcgaagtattcagtatgccaggtactgtattttggggtagcatgtcctaaaccctcatcaactgactttcatttcaaaagcttttaaatcccctgtgataaaaggtacagtttgtaatgtatgcaaccatacttagaaatctaaaaactgataataggatttggcaggggggtaccccatattgattacatatgtttatctagtgctttgatcaaaattgtttccctttgaaaaatacagcagtgttgactttggtggggcggtgggcggggggttgttcctgcttacatgtctgctgaagcatagtattttaaggttttgttttctttatttatagataatttaaaagctgactagttaccctctccttagaggctttgtaagtgcattcttatcagtaagatacatgtttactatatgactcagctagattctatatagatagtgtccttgtatcattaccagtaccatataaaaatactatatggatatatagggttgaaaacataatttattttctttccatttttagatttttagttgagacattctcttgaaaacaaaagtcagattaacaaaagaaaaagaagtttattaaagtgtgctgtacctatcacttgggagaggcctcagttcaaaagtgtatctctttcaaggcagtggcatgggggacttgcttaaatagtatcttaacaaaaagccagaaattctatatagtgacaagacaaaaaagatttatcttcaggcttccaaaaggtggggtaatatgggaacacatatttactactgctgtctctgagctgataagcagtgttgcaaaaggggcctagctttaggtgagaaaggcagcgagaaggggtgggcaaagtgtgcccgttttgttaagcttttaacttaaactaaaatccccagtattttagagaggaaaattttgttttcctccagatacttaacagtttataaatctagtgttctaagaagtatgttaaaaaaaacaccttattcctgcttccatgtgaattatattacctatgaagcatcattgtacatttatgtaaattcacatttgctaaatcacactgagggaaagcttaatataatcatttcatcattatataatccattcagtatgattgcatttcctcctgatgcaatttgataaacttgtgtttgtatagctgcaagataatgttccacagataatgcagttttatacattttattttcaatgctttttagtgggtgtatgtgtatgctatgtagagaaattagatgaagtttctcttaacttcattatgggcaacaaaattccttggctttgttacagtttactaggccccatagtgaaaacacctctgagtgtaggccaattctagaatacaaaattacttgtgatcagagctgtaatatgagattgaaatttgttacacaaagaggttactatcctttttttgaggataattaaacaatttgtttctttaaaacaaattaatagtgattgtttcaggatagtataaagtacaatttaatctttaacagtgagagaggctttgtagtggggtctcagtggttaagtccaattctgggacaagtaaaaatgttttagggtcttattacagaatgaaaactatattgtttcttaaggaatttaatgaactaaaaaacatttttgcttaacactcttgatttgtagtacatcgaccaagtatcttcatttaacagaaagtacatacttttgttaaataatgaagttttctggaaatctgttaactaagggtacttagagtaggaatgtgaatatttcaaatttcaaatcatccttttcttatgacaaaactctttttgtggcattacactgctttagaataaagttcattaatgcttgcttaaaaaaacataaggggtactgtatgtgtcaaaaataaaaagttggaacttcataaaattataggatttttttcttcctttcccacctctactgttttgtcattgctctttgagatgaaagagtctaaacctgtatgtttatttaactgttggatttcttgtttctcaattaggaaatgaaagcaaaaatctacacttgattttataattgacctatttgttttcaaaagtatgcacataaatgtcaaaatttaagtctaatgtaagctatttaccctaagcattaacatatctgtgtaaaaatggttacccatattgcatgtttaattaccttggtgtttaagagctctgatgaatattaataatttaccaggatttgatctggaattattttcactctgtgatattagaaaactcttaaaaacaccaacattatgttttatttctgtcactacatagcaattcctgggcaacatagaggtgacatgaagagtaagagagaaaggggattagatgtcgacacttgggattgagctgttagaaatagtatgtttgtctaaagagaggaaatgaaattttttttcttttttctatgcataagaaatgaaattttgtggggtaggtgaggagatctctggtttgtgatcttctttattgacttaatgcattctttcaatatctataggaagttatgtcagtaactggtagataaattctggcattacataccaaacaggagagacaagcttctgccttcattggagcttatattctctttagggatagcaaaaaaaaataagtaaataagacaatttcattgactagtaagtgctatgccagaaataacagagggtagagtgataaagaatgattggtggagtgattttagattcagtgctctggtaaggtctctgaaaaggtgataattaagatgatgagaaagcaccaagtggtggctggtttcttaaaatgaggtattaaattacctagatcaacatattggataaaatatataatatttaaatgctttaaactcttaagctctaaaaagatagccatttttttaatgatagcctgtaactaggtagggacagtagataaggatggtttaatgctgtgcagaaaaggaaaacgaaatggaaagagatttttaaaagaagtaccaaaggccaggtacagtggctcatgcctgtaatcccagcactttgggaggccgaggcgggcggatcacttgagattgggagttcgagaccagcctgatcaacatggaaaaaccccgtctctactaaaaatacaaaattagctggtcatggtggcacatcccggtaatcccagctactcgggaggctgaggcaggagaatcgcttgaacccgggaggcagaggttgtggtgaattgagatcgtgccattgcactccagcctgggcaacaagagtgaaactctgtctcaaaaaaaaaaaaaaaaaaaaagtaacagaagtatggccatagactgcctttcataagtatttgtgttgcaggtacatgtagcccatcttggctggagatggtccagtctcatactgtcccccaaagcaaatgtaagcctctacagatgagacatattatcctagacctcagtgaacccctacaattacattttccagcaagtagtcaaagataacaaagcatatggagaaacagacaactgaaggagaaccagcaaaaagagacagcagaattggaattccatagacttgggatattaaaaatattagacacatatttaaaataactatgcttatgaattataatacatatgaagatatctccaaggaaatcacaaaaagcagcatagcagatttgaaaaggaaccagacaaaacttttggaaatgaaaatcccagtaactgaaatttaataagcctggttttgtgttgagtactttgtatcaaatgaattctcctactgaaaccttataaacgttaggccatatatatatatacaacagctatttgaaagccttggagagcagccggtgtaggttcgacttgagggtctgtgattcttgagaaaagagaagctcatgaagtgatctccatatttattctggtcttttccttgagggaattttctaattctcagtgccagatggagatcaagcaaaaagaaggagttttacatggctaaggagcccagagaggctggtaacggaggcctaatcgtgggggttgggggtgagaggagaactgcagagaactgaatattctgcacataatatctgcatataagttctccttcaagtatggtagtttaatcactacccaggcccagggcaggatttctggaaacccatctgataacagtgactttgaggcttaagagctgagcagaaatttcagcaactttgaaatacagattgagttcgaatgcataagataactagtaattggtacactgaagccattatctaaaaagtatatcctttatgatatattcacctgtgtaaattgtgttcttaaaagctaaagatgagagaatttgtttaaagaaatacagtaataggctaagttctgtgatctttatcttatatggaggagtaaggctgtgtcccaaatgcaaatacagcttcaggtatttgagattaaattaagaaaatacagtagtcccctccttatccatggggaatatgttctaagaccccccagtagatgcctgaaaccacagctagtactgaactctatgtgcagtgtcagttaatctgataaaagtgactgtgtgggtggggagggaagggtagcacatacagcatgaatgcactggcaaaggaacaataatgtcctgagtgggacagggtggtgtacgatttcatcacactactcaaaatagtgtgcaatttaaaacttttgaattctttatttctggaatttttcacttaatattttcagactgtggttgactgtgaataattaaaaccatgggtcgtgaaactgcagatgaaggaggcctactgtattacacctttgatcataattgtccactatctgaatgaagcaatatatgattcttactaacttttcacttgctgtaccagattgctacagaaggtaagacctacttagaggtcaaggatatccttgtgttggtccatacataattctttaagtcatctttgtttttatcttgctaagggtttccaatatatctttgttcttatatataaacagcttttaaatgcttaggaaaatttgatgtaagtactaaaatgtcctcaggattgaccagtacatttaatgcatgaccaaatacattcaacatccacaggaacatacagcattcaggagcttgttttttataggtcattgaattttctacagagctactgctgagaattattttttaaagtaatatgcttgtctcaaatatgcttgtctaagtcaataagtccatttcactagaaagtttccaggcagtaaataaagcaatacactgagcgaatttttattgtctcgagtgacataatgtctctagttttcttacagttcacagtggttttactacagaagcacaacagtcattcctgttctcttagtggaattattcatggcttttaataaggtagattttattatgtttcaagatcttgaatttttttaggcttctgtttccatacacacacgtacacatttaatatggctttctgaagtacctttaaatcagaatttatcttacttttgctgtgtttaaagcattttctattgaacttttcaatgaaattcaataaatgtaatatttttcaactttcccaaaaatttaatattaaggctgatttatagaaattcatctaaaactttgctactcaaactgtggttcatggactagcactctttggccatcacatgggagcttattagaaatgcagaatcctcctcctcccccatgctgtcacttactgactcataatctgcattttaataagctcaggtgattcatatacacatttaagtttgagaagtgtagatctacagatctaaaagcttatttactagtgcttatacttcatctagttaaccctcaaagggaaagagccctgtgttttagaaaatgtataccacagcatgaaagatcaaggtattttaaaaggtttctaggaatatcttagaggctgatataatctgttctttttggaaacaataatttttattttctttttcttttttttttgagatggagtttcactgttgttgcccaggccagagtgcaatggtgcgatctcggctcaccgcggtctctgccttctgggttcaagcgattctcctgcctcagcctcccaagtagctgggattacaggcatgcaccgccatgcccagctaattttgtattttcagtagaggcagggtttctccatgttggtcaggctggtctcgaactcccgacttcagatgatccacccacctcagcctcccaaagtgctgggattacaggcgtgagccaccacacctggccttttattttcttcttagtggttttaccatgtcatttgttatatccctttctttttgtttatctattaataatctaggtacacatcttcagtttcagctcttttctgtagacttttaaaaccaatgtctgttctctctcccatttgactcaatttatatttctgacattttccatatccaaaaagaatatatcgtcattcttttcaaattatgctttcccccccaacttacttttgttaatcatacatctgttttaggcctagtaaagtcaaatattctgcaagagtcttttcacagcttttctaatacacagtgatttttcctttctttgttcctgtaaccctagagtaggtatggaattcacgtcattaacccaactttctatttccacgttatttgtacttctgataataaagtttctgacaataaaatatgttcttggaatgcctctttgtaaatggcagtaatattccaaatgattagttatgccaaaaaaagggagaaaatagttatgccagcaagtacaccttgcctgttggttgaatgtaaacattaatttttttgtttctgtgttttcagttaacagggttggttatgtagtaaccaactcctagcaaatcttgactcattaaaaaaaaaaaaactaaatgaaaatcccaaaagtagtacagttcttataaagcaaataatgagtagtcttacctttaagtacataagaagtggacttaaaattgatgcttgagaccttatcaaatgtacaggtaatcatttcttaaagctgtattggattatacaaatgtaaactaatggaatactaacttaaaaaacacaattttaagactaaggaacattgaagattatcatccccttattttaatgtaatggaaactgacacagcaattaaatgcctgtttctagtatttcttaccaaaaagtatgtagaacatatctctcagcttttgagttttagtctaaagtccagaagctccaagatgataaatttccaaattatgcccacttcaaatagggaataaaacttggactaagtggcgtctggcatcagactgcatgtgaatagttttaacgcaaaagacttcctgttccaaaaaaatgatccaaagagtagaatgtagttggtagtttgccctaatcaattgttggggacatctagagttgtgcatttgaaagcttgtaagactttgcccagtttcactctatgcatgttttctactattgttttctttatagggcatgacagtcatttaccttttatagcttttgtatgcttcagctatgtagcacagtgggaacatacacaattttgcacttgggaaagtactaccctgttttctgggttataactactgaaacaattttaccagttctaccctcagtttctgttgaggagtagccaaacatgcctactgttctagagatatttaagataccagtccctcagaatcaaaattaatgcctgcagtatattggtttccagggtttgttgctttgtagtggtcaggtatccagaagcttcatcttaagtataatggaagaaagcttttgtttttatacaagtggatataaccctgataatgttgtatatcactttgagaaataggaaaaatagctgaaaaatgagagcaaaaatattttaaaatctttatttttccaaaatgccaaaatgttgtgtggagataatcaggagaagagaggtgctgtatgtgaatacctttggatttactgtacacaggctactcctcataatccattgcttatctttttgaaccaagttcctatctccccaaaataccatgtaatcttcgggttaaattttgttaatattataagtttcaaatctttatttacttttgggggataaaaaagtctgttgtagtggttgttttccaaattttccttgccctgtcattttttatgtgggctatctgcgaaggagaaaatttgtaatctaaatttaataaaacttcaaatatttaaatggtttctaaaagtccaagacagttttcctctgaaaattaaaagagccttctagaactttagagctcagaattaaagaactttaaaaataaagtattacttttaaaaagactgtttatgaaaagttgttattgtggtattactattgtagttttttttgagacgaagtttcactctttttgccgagtcgggagtgcaatggcacgatcttggctcaccacaatctccgcctctcgggttcaagtgattctcctccctcagcctcccgagtagctgggattacaggcatgtgccaccacacctggctaattttgtatatttagtagagaccaggtttctccatgttgatcaggctggtctcaaactcctgaactcatgtgatccgtccacatcggcctcccaaagtgctgggattacaggtgtgagccacccccatgccaggagtatttttttttttttgagatggaatcttgctgtgttgcccaggctgtagtgcagtggcgcgatctcggctcactgcaagatccgcctccagggttcacgccattctcctacctcagccacccgagtagctgggactgcaggtgcccgccaccaagcctggctaatgttttgtatgtttagtagagatggggtttcaccgtgttagccaggatggtctcaatctcctgacctcgtgatccacccgcttcagcctcccaaagtgctgggattacaggcgtgagccaccgtgcccggccggactattgtatttttaaaataacaactgcctctaaattttttggtaggtgagataactttgtatgtagctactatttagactgttaaatgttaaacctagccaggcgccatggctcacgcttgtagtcccatcactttgggaggccaaggcttgcagattgcttgagtccaggagttccagaccagcctgggcaatatggtgacaccctgtctttacaaaaattacaaaaaaattagcagggcatggtggtgtatgcctgtagtccctgttacttgggaggctgaggtgggaggatcacccaagcctgggaggttgaggctgcagtgagctgtgctgtgattgcaccactgtactcaagcctaggtgacaagagtgagaccctggagactttgtctcaaaaaaaaaaaaaagaaaaagaaaaaaaagagttaaacctctgtgtctcattcactatgtagtttgttttttttacacaaaagtctatttttttcattgcccttttgaccaaaaagttaaaaattttcccccccgctgactaccttgtataggtcccctttttggtcacctacaaccctgaaaatccttgactcctgatcggacgttttgggagtcatctaaagccatttgggaatcattgattagtctagaatgtagatatggaacaatggctcttgcaactttttagcagtggaactatttaattaaaatctgtcatagaaacttaggatgtataaatgtacaacacataagtgaactactcttctctcgaagcaataggtgcagaggttggatttgggccctatctacttgtataagcaaggggtgcgtgtggcccacgccctgatggctccacagatcccagtccagactagaagatggcgtctgtaataagtgatgaatcaggtgaagaaggatctttgaacagggaaagcaaagtattggtgcctcataagttttgaagaaacccttgactggctgtgattaaagtagaacataagattaagtcaaaagctctttaagatgcattttatctgttttgtgttaggtatgaaattagtttaggctaagattcaggagaaaaaaatagaataatgtttacacattgttaaacattagtattcatactaaatgggattttatgtgcagttaactaaagctaaaaaataatttttgaatgtatacagtattcatgaacaaaaaccagttagtttttgtttttatgaatagcattgtaaagttcagtgcttacgttaccattaacctatttaatcagatgcacttagagttgcatattctgggtttgtgttagaacaaaaagcgtcaatttttgtaatttcttttatgcttctctcttgaattttgtttgatgctctttatagaccctgtcaaatacagtcagctccctgtacccattggttccgtacctggattcaactaatcacaataaaaaatattcagagaaaggatggttgcttctgtactgaagatgtacagacttttttttttcttgtcattattccctgaacaatacagtataacaaccatttacataaaattttcattgtattaggtgtaataagcaacctagagatgatataagtatacaggaggatgtgtgtaggttatatgcagatattatacaatttaatataagggacttgagcatctcctctgaagtttggtatttgccagagttcctaaaaccaatcttctgtggatactgagggacagacaactctatgtaattgtttgttttttagtcctcagctaacttgttacattttttaacaataggattctcaatatgtggctaaggaaaatgtttatgccaccaaacagcttctgaatcttttttgttgttcatttattgattcaaaaaatatttactgaatactggccgggcgtggtggctgacacctgtaatcccaccactttgggaggctgagatgggcggatcacctgaggtcagaagttcgagaccagcctggccaacgtggtgaaaccccatctctactacaagtagaaaaattaggtgggcatggtggcaggcacctgtaatcccagctacttgggaggctgaggcagtagaagtgtttgaacctgggaggtggaggttgcagcgagccgagatcacgccactgtgctccagcctgggcgatggagggagactctgtctcaaaacaaatgaacaaatatatatataagcctgcgtatctcaatcactatgtagtttggtttttttacacaaaagtctatttttttccttacccttttgacatatatatttatatataacattgttaaggggctgttagaggaatgcatcatacagcaagtactgtttataagcagagaaatatttactctgtattagagtcactgtcatctgaagaatgacaaagtaaaattttttgtgccagtttgagtgtattccctgaactaattccatccatagtttgatacgagaatataaaagacaaaatatcctttctagaaatattcacagtgcactcatggtgaacactaacactaaaggtgctatagagcttcaagttttttgaagaatattaagagtgacaaggaggcttaggagtcatatagtgcatattctcaaccaatatagaaatccaggccatatcgtttttgatatcagtcccctgcttaaaatttctacaaatggtaacattagtaaaggacaatctatttcatttttaattaggtcatccttggaaataatagtttgaataattaattgaacaaaaagtgcctgttattttccattccatggtcccagttttgacctctgcagttaaaagtttaagcctaatcagctttccacaggatggcagttgcatgtttaaagatagttatcatgtccctctggtaagatttttttttctttgtatcaatatcttttaaagttgatatcttttgctatgaatctcaaattgagaagggttgcttatcatagtgtgaatacccttttgcccacgcagaggcagaatcctcttctgtacatgttggttttgttatttttcttgagctttcaatattttgtcttgttagctcaaggttggtgtaccttatcctccaattttcctaaattttcaaataaatcaatcctggtacctttttaagcaaataaaatatttaatctatttttgttattttaactaattgactcttaaatcattatattaaattataaagtaaataaaggtatagccagtgaaaaaattaactacaataaaagacaaaattgagtgacattaaacatttagtgtataaataaacatcagtgatttacattgttggcaaaataataacactgtaaacatctctgtagcaattgtggattcaataattaatgattaaatgaatgtatacattttgaatgctcttcctttatatatcatcacttgttggatacctaagtattcagttggccttcgtggcatgtttaagagattctcttttactaggtgaactgagatgctcctaaattataattacatagtgaaagacctcacatgccaatccttgttctcctcagtcatattaccaaaatttggtgtactttgaaggattcgcctatgataaaataactttttagaatttttttaagaatcagtgtgatggaagaaaacagtggatttctgttagtattttgtgagaaatggaagattacgttactgttgtctctacttcttccatgtaaagaaaatatcctcattacatttttgagtgaaaagaaagatttatttctagagccatatttttgtataaaattagggttttcataactttctaaatattaggtagaataagagaaattcttgtctaatctgttatgaaaacaaaactttaattaaaaaatttttgtgaaaatcttgaaatacactggtaagttttgtataggctgtttagcattccagtgcaatttggggaaatgcttactgttttccttgtaatgttttccattaccttaaaatgcagtagtattgcccaaggatagtagtgaattaatgaaacaatttagcattgacatgacccactcagcttattttttgttgccaaaaggttcaaaagaagacatttagtaatgctgtgagccatgggagttgctgtgctagtttattattacagcacaacccagacatgcaagatatccttaaataaagggcattgaggtagataatgcacacagagcacttactagtcaacaggacttggtttgcatatataggcaatgcctgtctactgattgatgaagcctattatcatgagattgtatttttattaaaggcaacacttagtaattctgtgcacagatgattaatagccaaatggttatagattttagttaattagaatggttaagatgaaaattctgaatgaaataaattgaatcatttctttatattgatccattatacatgaaattattaaagcttaagattgccatgtaaaggtaaatcatgctatgagtattctaactaaagtttgaatcattttagtcatttcttctcataatataaacatgctatgattaatctaaaatttatttctaaatatttgctaacataagataatagcttaatccctttattagcaataatttttgttcactagcagctgctgagttagagcgataaggacaagtcactgttaactttctgttgtagaattcttctagtcctttcattatacggctgctagtactttttttctctacagaatggagtgagtgaaatagcagtcttataaaagagaagatattttagactaagtgagtaatgctgtccattgcagtaggaagaagggtcaattttttttcttacaatagcataaagattttttggtcaacaagttctgtatagattatacctaaataacctcttaatttcttttcttaagccctgcagtcataccagaagcaaatgaaaatcatttagaaactcagatttatcagtttatgatactacttgttctagttttttttaaaaagtttatattcaagaatatagttcatacacgtactttcacacacacatattcatataacatcctaagagatccatgtatatgtgtacatgcattttctatttatctttatattttgtgatgcttggcttcctaacatatgattaaaaatatctaccaaatatttaatttgtagctcctgccaccatttctacaatggtgggaatacctagaggcatggcccctaagttattatagaggatgcatagaaggacatacactcaagcactgtgagagcattatattggtaattatacactcccagcatagcaaggctggttaaaatgtgataggagaaaccacctcctgtttcacttcatacctgttactttctactcattttttttcctctcaaaatactttgcactcctctgacatttctccagtaattcacatctttacggtatttttttcattctaaggctacttcatgacacttgactttacagtatttgcagtgtgacatagtttatcatttatgcacaatgctaatgcagaataccatttcaatgcttgtgtccttgtctgtctttcattaaaaataatagcatcaaattctccttgaagtgctgtgtttattattttctgtatattcctgtgcatctatttttaaatctgtcaacagtctcaactgtgtaatcttagttttcagtaaaataaaatggtaaaaatctatcttcttatttgcaaattaaagtaaaagttatttttttaaaaaattttatttgtaatttttgtgggtatatagtgggtataaaataattttaaattgtagcatataactaagaaaggtactcagatttcggaattgtgaggaaagaaataatattttaatagaaaattacttacattgggcatcttggacactgcttttggtctagtcttcctgacaaataatttaagtagaatgtttcctgtattaaatctcaagagaagcaaagtcaatttacctgaaattatattgagatataatcaatatgtagagtgacttaaaaataagaaaagtccagtaggttatacagaaattagtctcattacttttcacaactcgttcttagggcaaaataatgtataacatataccatcagttaatgactcatatttagagtttgataattaaattatatctaacactgaagcagaaatgaagactgattgcttgtgtcatgtattgacaaaacatttatacactgtaatattttgaaacataattactgagcaacaatgacatgaatgttttacttaattgcatttgcttcagtatcagttatccagaaactccaaggcagttcttaagcgaactttctaaattcagtagcaagtaaccttttagtccagctcataaattaatgttttgacagccatttaaaatggcaagtaggtaaatttattaggaaacaatgcaggataaaattgaaaagacttggagtgggtacaactgtttgtgtttgactggctcaagaaggtttcacaagccccattacagtaaaaattcctcataagcagtattttaaaatattaaaatctacttgctaattctctagctaccaagctacgaaattcagaaggagttgtgttgtgttgttttgttttatttatttattcgagacagggtctcagtctgtcacccaggctagagtgcagtggtgcaatcatggctcactgcagcctcgacctcctggactcaagtgatccgcctgcctcagcctcccaagtagctgggaccacaggtgcatgccaccacaccctgctgatttttgtagtttctctagagatgagattttaccatgttgtccaagctggtctcaaactcctgagctcaagcgatcgcccacctcggcctcccagattgtaggcatgagccaccccatactggcccagaaggagtttgaaattagaaaattactgtggacaatattgcgaattcctagcttgtcactattacctctgttatgtacaatgtgtattatgtgtttacctttctccatccctttaaactgtgtataaaacagtaagtgtgataattaaccttctttccagtaatctttggaaagaagtaggaaaggtgaacaggctcaaattaaatgcaatctcagacattgaagagatttccaagaaaatgggagcaactggtcttgttatttatggtagttccctgacatacaactagccagttagccagtactaacaaacacagaaatggacttcatgttgagtagttgccataggtatataccatttgactgtttttaacatctgtattgcttacgatattggacatctctctcactccccacatatcatggtttattagtcagcttttggtaaaccgtgatagcaaacaactccaaaattttagtggcttatttgttctcgtttactgtgtgaatctgctgtgttctgctctgtacccgcttattctgataacctaggctaaaggagagaggaaggtgtgatagcaggacctgtgtcatggctcttaaaacttctgcttgaggccaggtgcggtggcttatgcctgtaatctcagcactttgggaggccgaggcgggtggatcacgaggtcaggagatcgagaccatcctggctaacacggtgaaaccccgtctctactaaaaatacaaaaaaattagctgggcctggtggcgggcacctgtagtcccagctactcgggaggctgaggcaggagaatggcgtgaaccagggaggcagagcttgcagtgagccaagatcacgccactgcactccagcctgggcgacaaagggagactctgtctcaaaaacaaaacaaaacaaaacaaaaaaaaaaacaaaaacaaacttctgctagaaactggcacatagcactttcacatttcattagtaaagcaggtcaaatgaaagcaagaaatgtaagccttctataggaacaggctcagtaagggaaaggcagctcatattaggactgtaatactgtttgtcacataggagttaatatttatatctcccaactgcaccaaccactgctccatccctactgtttatggcagagaagcacaatttttttttttttagcttttacatgattcttgattttcttcttaattactatttacatattatagaatgtaattaggaaataacagtaaaatcagtgacactggtgaatgtagagagattagtttacaaaacgtattatgtcatttatatccatactggtaacttcttactgcaaaaataaattggcaataatgtaggaaaaaaatattattccctccttgttttttttgtatagagtaccattctggtaaaggagccagtagagaaatttggagtaacaaattaaacatttttatttttcatgttagatattttcatatgtagactaatactagatgttctgctcttatattcatttggctataaatttgaaatattttgaagtaccaaaggttttaaagtaatatttcttatttatttaaaacacaataaaagcatataaagacacaaatagattttactgttttgttttgttttgttttgttttgttttgttttgttttgttttgttttgagacagagtctctgttgttcaggctggagtgcagtggcatgatctcggctcactgcagcttccacttcccgggttcaagcgattctcctgcctcagcctcctgagtagctgggactacaggtgtgtgctgccatgcccagctaacttttgtatttttagtagagatggggtttcaccatgttggccaggctggtcttgaactactggcctcaggtgatcggcctacctcagcctcccaaagtgctgggattataggcatgagccactgtgcctggcctcttcacatttcttatagaaaaatattcctatgaatgagtagcaaataattctgaacataaaaattgagattctgaatttccttcctgtcaaatcaaaaagccgtcagttccattatgtttttgttcagttataattccttttactttttaccaaaattttttcctctggcattctttttattattattttttaaattttgcccagggtggagtgcagtggcatgatcatagctcactgcagccttgaactcttgggctcaagcaattctgcctctgcctcccaacagctgggaccacaggtgcacaccaccacacccagctaattttttaatttttttgtagtgacagggtctcactatgttttccaaggtggtctggaactcctgggctcaagtgatcttgagcctcagcctcccaaagtgctgagattacaggcatgagccactgtgcccagctgttccccagtattcttaatgccacttgaatgattgattttataaatgggttcacttttcttttcattctttaattaactcatcaataatagaattagggcattgtatattgttattttataggacagccatctgtcttacctaacaaaatcagcataatttaaatcttaatttcatattgagcacctctattagggtaggcaagaatttttcttatttggtagcactacagtccaaagccaaaagtactttgtcaaagtgacagatttaggtctaagatatgtaccttgaggaattgatattgtaactttcttctttatgcatgattttggagatggaagtagcatagctaggacatacggttttatttatattgtttagtggctaaggaaggttaacatgaaatcttgttcaatttattttttgtatttgcatagtaacgtaattatcaattctccttcagtatgcatgcaatgcattgattcataattaattgattcccctttccacaatatcatcttccagtgctttcagaggatagaaatgtccactaatgcttaaggtgttctacttttttttccttcattttacggttacttccccatcagcatttcacctttttctagcacttttatccaaatcatagattttctatcactgtcaatatttgtattagtctgttctcacactgctaataaagacatacccgagactggtaatttataaaggaaagaggtttaatgaacccacagttacacgtagctggggaggcctgacaattatgggggaaggtgaaggggaagcaagacacgtcttacatggtagcaagcaagagagcttgtgcaggggacaagctctcatgagacttattcactatcatgaataaaacaatcagatctcgtgagacttatacactatcatgagaacagcagaggaaagatccacccccatgattcagttgcctcccactgtgtccctttcacaacacatgggaattatgggagctacaattcaagatgagatttgggtgaggacacagccaaaccatatcattctgcccctggcccctcccaaatctcatgtcctcacattccaaaatgaatcatgccttcccaaagtcttaactcattcagcattaactcagaagtctacagttcaatgtctcatctgggacaaggcaagtcccctctgcctatgagcctgaaaaatcaaaagcaagttagttacttcctagatacagtggcagtataggcattgggcaaatacagccattccaaatgggagaaataggccaaaacaaaggggctacaggccccatgcaagtccgaaatccagtggggcagtcaaatcttaaagctccaaaatgatcttttttgactccctatcttacatccaggtcacgctgatgcaggaggtgggcttccccatggtcttggacagctctgcctctgtggcttcgcagggtacagcctcccttgtgactgtgttcatgggctagctttgagcatctgcagcttttccaggtgcacaatgcaagctgtctaccattctagggtctggagtacagtgcccctcttctcacagctccagtaggtagttccccagtggggactctgtataggggctcccacagagcatttcccttccacagtgccctagcagaggttctctatgagggccccacgactgtagcacacctctgcctggagatatccaggcatttccatacaacctctgaaatctaggtggaggttcccaaacctcagtttctgacttctgtgcacccacaggcccaacatcacttgtaagccaccaaggcttggtgcttgcaccctttgaagccactgcatgagctgtaccttggccccttttagccatggctaggaagcagggcaccaagtcctgagactacataaaacagcaaggctctgggcctggcccaggaaaccattttttcctcctaggcctctgggcctgtgatgggaggggctgccatgaagacatgtcatgccctggagacattttcctcattgtcttggtgattaacatttggctccttgttacttatgcaaatttctacagctggcttgaatttctcctcaggaaatgggtttttcttttctattgcattgtcaggctgctgattttctgaacttttatgctctgctgcttttttaaacttaagttctgattccaaaccatatttttgtaagtacataaagctgaatgcatttaacagcacccaagtcacctcttgaacactttgctgcttggaaatttcttccaccagataccctaagttatttctctcaagttcaaagttccacaggtctccagggcaggggcacaatgccaccagtttctttgctaaaacatagtaagagtcacctttattttagttcccagaagtttctcatctctatctgagatgagcagcatttgaacaaagccattcaacaagtctccaggaagttccaaactttcccacatctttctgtcttctgagccctccaaactgttccaacctctgcctattacccactttcaaagtagcttccacatttgtgggtatctttacaacagcaccccactacctcagtaacaatttactgtattagtctgttctcatgctgctaataaagacatacccgagactggtcatttataaaggaaagaggtttaatggacccacagttccacatggctggggaggcctcacaatcatggtggaaggtgaaggtgaagcaagacatgtattacttggcggcaaacaagacagctagtgcaggggaactcccctttataaaaccattagatcttgtgggacttatttaatagtacaagaacagcatgggaaagacctgcccccatgattcagttacctcccactggttccctcccatgacacatgggaattatgggagctgcaatttgagatgtgattggcacacagccaaaccatatcagtattcattttgcaaaatgaaattttagaacagctatatagtgtaaaagttgtcaaagtcaaaatggaatcactaatgttaaacaaacaaacaaaaaaccctgacaaatagagctggaggaggctgtgaagagagggttctcatgcttgcacgcttgataaaaactatcataaaagactccacaaaaaccacaaccatgtacaaaggccatcacaactttactcaataaatacttctacccaacacatctgcccagcaactggctgtccaacctttgactcgtgtcactcttgttattgatctttatagccaaggataatcattttaaaacatttatcttatcctcctcacttttcctttaaaaactattgtcttcctaacttctataaatacacacattgtttactatgacacaggtattctcatgaaaatgctctttccaaataaatatctttcttttagagaacctttctcagtttgttattaaggttgacagtaacatgcctttacttagcagtaactttgtggggttttttagttttttgtttgtttgtttgtttgagacagagtgtcgctctgtcaccaagctggagtgcagtggcgtgatctcagctcactgcaacctccgacttctgagttcaagtgattctcctgcttcagcctcccgagtagctgggactacagacacgccccactaagctcagctattgtttatatttttaatagagacgggtttcaccatgtcagccaggatggtctcgatctcttgacctcatgatctgctcgccttggcctcccaaagtgctgggattacaggcgtgaaccaacgtgcctggccctgtttttttttttttttttgagacagagtctcgttccgtggcccaggctggaatgcggtggcgcaatctcggctcactgcaagctctgcttcccaggttcacaccattatcctgcctcagcctcctagtagctgggactacaggtgccccaccacgcccagctaatttttcgtatttttagtggagacagggtttcaccgtgttagccaagatcgtcttgatttcctgacctcgtgatctgcccgcctcagcctcccaaagtgctgggattacaggcatgagccactgtgcccagcaagccctgttattttttatgttgagtgtttccttgaagggcatgtggaagaaaatgccataaggtggcccatcttactttacatttctggtttagagtgatattattttgaatttctaccatagaattgaaaattatagccaatgaaaagcaatgtagctctttttctttctttttttttatttttattttttgagatggagtctatctctgtcaccaggctagagtacagtggtgccatctaggctcactgcaacctccaactcctgggtttaatcgattctcctgcctcagcctcctgggtagctgggattacaggcatgcaccaccacgccctgataatttttatatttttagtagagacggggtttcaccatgttggccaggatgatcccgatctcctgacctcatgatccgccaacctcggcctcccaaagtgctgggattacaggtgtgagccgctgtgcccggccttagctctttttcttaatgagaatgaaggggttttcgtgttgttgtgtgtttgcttgtttggttttggttattatatctttatttaactcagaatttaaagtcaaaggtgctaatccaccctggatagacccagttaaaagcagagtgacttatcttccatgaatcttggtttatcatcaggatatttaaccttgagctcattacctcttcacctcccattagaaacctggatgggagacatcagttttggagaagatagtctaatgcagtttttttccaggttaatcaatcagtcagtgaattaattaattctttaccctttcttgctttctttcttttctctcttcctccattcctttctctctctctcctggcttccctcctttcagtagaattctttctctaataaaattacacagaaataacacaatctattttattacattgtttatttcagaaaataatttgggttatatgtaactggtaaataagggaatagcatcaatataatatagaagtgaagttggtttataataataattcccaggacttccaagttgcagcagctatacataaaacacactaaattgaatgtagcaaccaagtgcctgtgtcccattcacccgtgcccccattctaccttttggctctgttcagccgtatcctctggacctgatacctgttggaacagagagttgctataggatggtggagatttttgaccgtcagtttctttaatggttattgggtttttttttttcaggttttcactttctttttggggtcaatttttatgacattttaaaaggaacttggttgttacatatgatatgttatctttagggtgccttaggcaccttaaagcttgaaaattccaagctaatttccaagattagcttggaaatgaagatttaggtgttaacatgggactgaatgaggtttctaggctgaggctgtaaaattaagagtgcagggaatgaagaacaaaatttgtgtctagtgtagcagcctttctctctctctctctcctttcttttttgcgacggaatctcactctgtcacccaggctgtagtgcagtggtgccatctcggctcactgcaacctccgcctcccaggttcaagcgattctcctgtctcaacctcccgagtagctgggactacagggattcaccaccatgtccagctaatttttgtatttttagtagagagggggtttcaccgtgttgaccaggctggtcttgaactcctgacctcaggtgatctgcctgcctcggcctcccaaagtgctgggattacaggcataagccaccacacccggcctctctctttttaaaattaccattttcttcatatttatcatatgccatagtctagccattataaccatatgttatatatacatagcaaggagaaatgttctaagtattagctaatcatgcttgataggcatagtaagagaagacagcgggcacagtcattcgtcttttgtttcaacaagagtaaacttgttaaaaacaattggctgaaaaccccccagttatttacatatttgatgcttttttatttttgatttttgatatatgtgtcctttcttctggtttaggcctatgtttgcttttttatttttgatttttgatatatgtgtcctttcttctggcttagcctatgtttgcttttttatttttgatttttgatatatgtgtcctttcttctggcttagcctatgtttccgagggaaaacaggccccaaatcagaatattcaaattttgtattttatccatctatcccccacaaaagtgtcttgaatatgaatggttgttccccttttttaaaattaggaaaacaggtttaaggaattgattttacctaaggttttctcatccttgactcattggcttacatctttattttccatttcccaaggtaaaacatagcagtttggaattctagctgagtgtcctactcatcaatgtaactctcacctctttatttacccttcaaagataaataaaagccacacacacacacacacacacacacacacacagacacacacacacacaaagaaaaaacatatttacccttcgtttactgccctgggaaaatggagatgaatcctttaaatatttttcctttgccagctggcacagtattaacttttgtcagttaagggtactgacacaatgccattaaaggaggaagggagcttctttactagtttttgagtgcttgcagcttccctggctcctaaagtgcaaaatggtcatctgcactcaatggcctgtagcttcttgcagaaccctataccctatccacccacgaggcagttttgtagcagagtaactctgctgcttttgctgcttgtagcaatagcgtttggctcctgcagtgcatggaaaccagcagcacctagcagccaacatcttctgggtggttttatagtggagtgcttccagtgagacaccacccatgaatagcttttcatgacgctctaaaggacagatttccagcaagttctgcttatgtagcaccacagcatcttctgtgccatccagtgagccatagctgtgacctttccaacaaaatctggatcttagtctggggatatagtaggtattctttcttggccattccgttttagttctaagggtggtggttgcgccttatcatgttctagagttctccttacttcttagtagccaatctctggttattccagtactctgtttagttataataatgattctttatgttgaattttccctgttcaaactcctgtgtgatttctaatttctaattggaccttgactgatatattgtatgtttgtaaaatgcatggaatataaatggctaattatgatgtttctttagataggcattcttgagcacatgtgtctggaatatatttcactataatgttagttttgatgactgtattgattttcaaaactgtcagtttagaaactagaattttagatttatcaatcagcaatgtggtgttatgtggctaatagattagacattcatctgttgatgagttaaaaagctctccctggaattaaaattgcttatcactgtatagtactttgcatacatttattaatttccttagtaattttatgaagcaggttgcaggtatcacatttctgtaagaaggaattaagtctttaaagttcaaacggtattccttaatatccttggatatttcttaaccatcatatactgagtttactaggacatatagcacttgatccgttaaaactattacatgcaatgtcagagtttgtatgttgtagatgtctttcatgtcactccttctctgggccctgcccccatcataaacttgaataaatttgtgaaatatctttttaatatttacttttttccccaaaagtcacagtacattaaattgaatgcatttatattcttatgtcacattagcatcactttagcttactggatagtattttgtttttagttggttgcaagtgttgatttttcctctttcagtttgcaaaactatatgacaggaaatctgtagctaaatatcactttatgatttccatctgttcaagtacaatagtgtttatggcacagtccagattgcaatgtgatagaaatatcctattatagcagatagaattttaaatgatcattgtacattctaatgagaaaacatttttaaacaagtacttcacttaatttcaaagcagagtaactgaataatactacaatttgatgacagcatctgttctacagagtgtgtttgtgctgtcaacaataaaaactttttctgactcccatagaaatctatcagtttgctcaaatctgtactaataatggaagccaagtgggcagggagattattgtataagtcaatttgaataaccttaaaattttttgtttctattagcatggagagtatctctcattattttctgtgaaatgactttgggagtagagctggagatgttattttggcctttttattacgtgacagtaaaatttttgctaaattatattttgagagtattaacatttactaaataaaaacaaacccctttatcacaaggaactctggccatttcaaatcttgttggctctaaagttgagggatacaagaaagcagattaaaatgatggctcctggagtgtcaggtgttagtaattccaaggtttttagttctcacagtgtatatttgcctctattacactgatgcaaatgcatctttcatgtctgatcagctactatttggtcattcacttttatgcttcctattctagtacatgcagtgctgaaatgaatgggaaaaaccactttcccacatgaatgctctactgcacttttatctcaaaaggagcattgtatttcttgagtttccaaaggattttagataccattcttaatttaattattttatggccctttctctttaggtctgtattagtttgtgagggctgccataacaaagtatgacagactggatggcttaaacatctgacagttttggaggctaggagtttgagatcaaggagatcaaggtgttggcagggttgatttatttgaggccccttcccttggcttgtagatcatcttctcactgtgtcttcacatagtctctgtgcatgtctgtgttttaatctcctctcctgtgaggacataattacctctttaaagaccttgtctttaaatacagttacattcagaggtactgggggttaagacttcaacatatgaattgggggtcagggaaacaattcaggacataacaagatctttagccctcatctaaatgaaccatgaccataaacagttctgagcctcattctataggtacatcagttttcttctctacctttggttatcaaattccttagtaccccagctactcctcttttcccatttaagatgacctttctcctattccagacattggctgggaagttagtcaagaggtaacttaaggaatttagtgcagggtgtctaccttaagattttcactgatttgccttaaatcatgttcttccattacatataaaaaaaattaccagcaggccttgtccttcaggtgtgtttctcactcccagaatacatgttgactccacttgtccttcaggtgtgtttctcactcccagaatatattttgaatttgtaagaagtacgcagtttagaccttgttcagaatccatacagtattcattagttcccccctctagtcaatatttgtaggccctacaaacattccatgttcttccataaatcccttcttgagataataaagaagtatagccttttaaaccagctactcagcttgcttgtcaaattcatattttccaaacaaaaattaaataaggcttatctgatagttggtagttgacaatattattggtggtggtggtgttatttatttattttgagacaagatttcactctgtcatccagggtggagtacaatggcacaatcactactcactacaaccttgagtttccgggctcaagggatcctcccacctcagtctcctgagtagtcggaactacaaggtgcataccaccacacccagctaattgtttaattttttatggagacacagtctcactttgttgcatagtctggtctcaaactcctggcctcaagtgatccttctgccttggcctcccaaagtgctgagattataggcatgagccaccaagccaagctgacagtgttatttcataccaccgatgatacttcagagacccatcaactctgactatacatttcaaccaaaagttttgttctcatttattttatgccaaattagaaaattatttcctacttcttatgtagtttgcaagatcacagaagaatctgaaagtaacacagtattgtactttgagttaatttctatgtatggaggtatcaggtatactgttttgacccagaattcccaaaattcttttgagagattagaaaggaaaattagtagaatgggtgaagtcagcaggtctgtgttgacagagattattttaatttgaaaaaaacagtcggctggtattattaagtggaaaaaatgtggatcctttcattttttaaagataatttttcattacattaaaaaattcaagtaaaatgcaaggtgacccttaataaggtagctttcttacctgtcatattagtaagatttacaaagctgccaacacaccattttcacagttatgggaaacagacatactcatatattgttatgagcgaatacagtcagttctgccatagttcaacatatatgttccttggctgtgttaggcaaaattgcaccataaaaaacacagagcttgtgagaaaaatgagattaggagcacaacactcaaaaacttcatcagtgacacaaaatttaagaccctaataaaaattgtggcacagtttttaaaatacatgttaaatggctaagtacatgaatggctaaataaaataaacatggtactttaccttgaaaaagacctgaactttgcttgtggaagtgggccctagaagggttgcaccttgtgagttaataaggtacctttcttacctatcatattaataagatttaaaaagctgccaacacagtgttttcatagttatgggaaaacagacatattcatataccattataaaggaatagtcagttgtgctataataaagaagagatagttcttgtcctccaggaactcaaagtcaggcatatgcaactcaaaatcttccatattggaaagtggtagagaaaggttattcaaaatgggttggaaacttgtaacaatgaatgtgaatggttgtggcttgtgacacatgtgagctcatacctctgtaagctgaggtggatgtaggaggtacgtatgatttgtatatgcctaccctgctctgtttagctaggtacagttttctacatttatctgctttcttgaggataaaatcaagcataaacaaatacaaaatttgtgttatgtccaaattgttcccaatatgtcaattgtgttgtaacaaattcaaatttcaaagttagtgtaatagcagaactaatgagttggtataacttttatggagaataatttggaaaaaatatacaaaattttaaatgtacatgcccttttaaaaatctgcaaactctagttatcctaaagataaataacgacttatgcaaaatgatgtatttacaaggatattcattgcagcagttttttttgtcataaaaaaagatcataagcatcctaaatgtctattcatagatgagtggtaaaataagttctggttcatgcattctgagaattaccgtgctgctgttaaagaaaaccacttatacaaactgatgtgtaatgttcttcaagatatgttaaaaaaaaaaaaagtagggtttagaatagtatgtataacatgctatcactggcacaaaaatataatatatccttgtgtatctctatgaacagattaacactgaggcatatgctagtatcttgatatgccagactctgagttccttaaggacaagaactgtattttatttatcactctgtcttcaacaggtagcatagtgcctagctcatattaggtgcatgataaggatatattgaatgggatagatgaatgtgtcttaacattcatgtctcagaaaatatgataaacacaattctaaatgtaaaattgaggattattctaaggtatcgtttgtgttactattttttttcaagcaatgacttatgcttagaacattactgcattttcagattttgatttaaatatatctattgaggtcatgccgccactgggacatatccatagtagaaaacaactgatgaagagccattggagaaagggctaacaggacaaagagcagagttggcattaggaggcattatttaagttctgtgtttctccaaaggacaaaaatagaactaatggatgtagaagatatagggagacagatttcagcttaatataagagcataccaataggtattaacaatttaaagagcagtgtcttaaagacttttggtggtggttatgcagagattgctatcaggattaatggaaggaggaagcatggtgaaattgagagatcagtagtcatttttaagaatcaggcagatctggctgggcgcagtggctcacacctataatcccaggcactttgggaggccaaggcaggcagatcatgaggtcaggagttcaagaccagcctgataaatatggtgaaacccccgtctctactaaaaatacaaaaattagatggcgtggtggtgcacgactgtaatcccagctaatcaggaggctgaggcaggagaatctcttgaacccaggaggtggaggcttccgtgagccgagattgtgccattgcacttcagcctgggcgacagagtgagactccgtctcaaagaaaaaaaaaaaaaaaacaggaaaagaaagaatcaggcagattaggtttgagtgctctgccacttagggactattgtgaccttgagcaagaaacataaccttttaaatttccttaactatgaaatagggataattaaatgtatctcatgggattgctgtaaggattgagaaaaggtaaagtaccctacttcatgttatgttaagccctcaataaatggtgacaattgccattgaaataggaatacttttttaggtagaaggtatatggtatttggtttctaaggtcctttttcaacctgatatttcctaagttttattttacctattttaagtaagaaacatttatacatctgtgtttcaattgtattataccaaaaatataatttctgaattgtgagaaattgtttattaaatgcctatataacaatcatgcttaatgtatgttttaattattaagagatgatttgcatttaattatctaaggtcgactaccacagtagagactgtaacagccatgattccttcagtaaaacagaaattcactatgcatttcagtgagggactataacatagagaattggttacataggtgtcagaggattgaatgagcaaaagtgagagctctgaggtaactgagtgataataactgctgaaagcagctaacacttctggaactggagaagtgaagaacaggggacctgcagactgggactcaaagacctgaggagatggtcctgcctggcggctgttgctacctgtaaagaattagtatgaaacttgaacctggaacccaacagttgtggccaagggcaaagtattgttgcttgtaggacacctacagcaatatcaagtaaacagggaacacatttgtcatgctttctagtctccctctagtgttccttattggcagaacctagcaggaagccagatggcaaatgggaaatacagttttcagatcctcagccctaggatcacaaagcagagtataaaagggtaaatttggaattaagacacaatagcttgacaaatgcacagagacatctgtgtagaatatctcatattttaacaccaaatttatgtatttttcatatagaaaatttgcattttaaaatgtttttgtctagaaggaatttgcgtgtacatatactttccatcaataatttaagatgtgttcctttcagaaaggatgactgagttcactaagaattccacataatttgcttttctccccacaacccccaactcttgctgaaaatttgatataaaccctcatgaatctctaggaaaccttttccttctttattgcatgtgattcttccaggaattaagatttgcagaatgtaacatgaattaaaaattaaatttgaaatatttgcagtcatatgtttattgttactgagtaaaattgctagtgtggcttcagtttcttgcagttaaagcagggtggacttgtagagctgaggctgtttctatgatttaaaagatactgtgttaaaaaaatatattcttattcttctttgctaaagtgagccaatagattgcaactgtatttttgattaaatatagtttgatatttttgcaaattatttttttaaaagatactagtattcacagcaaatgtgcagacgtaactaagacatccccacacctctgttacaactagatatgttcattcgattttggtagttatacagttcccagtgaagtcaccaatgtttattggccccttccttcactgagatacgttcatgggttctgatgagaaatacttgtaattattctaagagcatgctttagcatgcaaccttggtaaaaatatggtaggatcatactcttaaaacatcttttcttttgtctgagtgcaggcattaggtaaattatgtcacacacagcactgcagtgatttatagaagttaaataaatgttcgtaagtaatcttaatacctttaaaatattttgggaggtaaggttttacattatgaaaatattctgagcattttataaaattattcaacatttatactttggttatagtttttgttaaataggaaatatctaattatataaaaaacgggatatattggcagagtttcttaataggagttctttttgatgtttcctttcatctcattagttacaaggtttaaattctatgccctaagttcattggcatttcacaggtagactttttgctgctattttccaactttagatgtgtgaagcctgtactacagcctctggatgaatggcaacataaaactagggtcttcaattaccagcttaaaaaaagaagatattaaatataaatatcagaaaacttgattataaacactattgatgggaagaaaaaaaaacttgattaaaatatcctgaattgtaaggggacccattcattaagatattgattataatagtgaaatttaaagtcaactggtttttctaatttatgttaatcataattaaccctccataacattgtaatacatgttggtaatagtctgaagcagactgttgtatgtatagaaacaatttcttcatatttttaactacctgaaaatatgagtaagttaacagtagttgagagtagtacagatttttggttttgaaataccattagaatagcagtgtcactttttaagcactgtgcagcttcctgtgttattcccttctttgtccaactgttactttttcttatgagaggcttccacaccctatttggtatccactttctttttatcaaataaagataattgcataatgaaactactgtgatttcatgccctaacttattcactgtctttgagtttcataagataagcactataattaaagtcattttaccaacaattagtgggaaggaagcatacagtggacaacatgttttaaaatcatagaaaggaggaatgcatgattttagaaatctgaatgagaactcatagcatgtagagctcaaattattcttcctcaactagcagcagatcaaaataggtggtggtatagtttgaaaaagcatatttaacattatcacataattttatactgggaaaatgaaaataaaaaagatgatgttttgtaatacagtccacatgagtaaggtttgataactggtgggagtgagtagttacagattctcaactgagaagggtggcaaaaaaaaggcttttatatttatcagaatgggacatagatgttttttctttttttgagacagggtctcactgtcacccagactggaatgcagtggcacgatcttggcttactgccaacctctgcctcctaagttcaagagattcttttgcctcagcctccctagtagctgggacaacaggaatgggccaccacacctggctgatttttgtattttttaatagagatggggtttcaccatgttggccaggctggtcttaaactcctgacctcaagtgatctgcccgcctcggcctcccgaagtgctgggattacaggcatgagccaccacgcccggctgggacatagagttttaaaatgttaagaaatgctaccttagattgtatctggatatcttctggtattaattgttgcctccctttcctgtctcacaggtctgtcataagatttattttaaagtttaaaccaagttctagcctaacaatagagggtaactactttaagtagacaatttcacgtacactactagacaagtgattttcatgtcaggagaactccaaactgagactcccatctaaggtacatctgggccacaatttctaaactgtgtgccaagaaactcaaatcctcacaaaggtgactcaaggccaactcagagccaggggagaagcctgctggtcttccaatcgcccttcaaataatttatgttttttacttagttttcaaaagactttactgggagaagaaaatagttttactgtcttaaaaaaaataatttgggtacccattgaagagtatcccaacaaatagcaccattttctttcttgtggctggcatagccagttgaggacattctgtttttttaaaagagcgtttctcactgttttcccacatgagactgacaacattgttttatttaccaggctgtgaataaactgtagaaaattagaaagtggattaaaaccttattttggatattttaacagtgggtatataccatatgttagatacatgtatacacacacgtttttgcaaactctaaattttgggagaatagcaacatattcctaaaggaatttctaaagagcaggtactggatagttgaaaagaattacaggaaatgactagtgtaaaaacggaaaagctgatatttttgaaatttactgccactgttctgttattatatttgtactaaaaataagtttcttctaaaaagtatagtttctgatttttgtttttaatctctactgaaatcagagcctactttatacaaaggtagtgaaacaaagtttgccctagtgttctattcctggttgaaataaccagatgcacttagttttagacatgaggaacaaactttcccaagtgttatctttttatcttaatattttaataaatagttatataaatattagcaaatctaatccagcagtgttttaaaataataaatctggaccaagtagcatttatccctggaatgcagggatggtttagtattaggaattatacctaatataatttagtagattagcagactaaagaaaatattatgtgagtcataaaccatgtatgggcacttttgccacataggtgcaatgttttaacagtcaaaaataaccaccttcttttaatagtgtcatgtgaattattctttttttgcattagaatttctacacatggtttctgttactattgtactgttattctaaacatttgtttgattttaagtctttatatcttttcttaatgtcattcagcagggcgtcaatagtaattctgaaaaatattgtcccagaaatcagtaactttggggaaaaagttaattatggtaaaatgtagtgaagaaaaccaaacaaattgatgttaaatgagagacaaaattgtacaaaatattagtgataaagctgagaaaaggcaacagtaaaacaaaaatgttgcagcgattatagatttttgtgctctcacaccatgtcatgtacagtttctttttcctatgggaaaattaatactcaatactgagttttgacttatgtgaaatctacaggaataaatacttttcatacaagaacaaaaagaagaggtacctaatttagctagagcaggacaggaggatgatggtagggaaaatgactagaaaaatttatccagatgaggaagtcaaagcttcagaaggtgaataaacatattcaaggacacttacaaatggataaagtcgaagtttaagtgtgttggtcttaggagtagaattgagtatgactctatagtatgcttactacttattttggtttcttgcccagaagaaaggtatttcggtaaaaaggaaagcaaatttgtatacagttttcctttcaaatgcagaagaagcaaaacacgctagcacttacaaatattaatttcagcttgctcttatctgtgtttttgccagtttgtaggacttgctaaaaaaaattacacagccctggggtccttagctaaccaacacattcttgttactgaccaggatatgctggttgactgttttaccatgtgcgttaaattaggagaaaaagatatacaagttcatttggcttttatgtgcacagaatcttttcaaattgtaaaaataaaattacctatccactggaggatatcttgggccaggagttcaagaccagcctgggcaacataggagaccctatctctacaaaaagtgtaaaaattagtcaggtgtggtggtgtgtgcttgtagtcctagatacttgggaggctgaagcaggaggatcgcttgagcccaagagttcaaggttacagtgagatatgatcatgcctctgcactccaacctgggtgacagagtgagaccctgtctcattcattcatatacacagacatgcatgcacacgcacacacgcacacacacatgcctctccacttgaaataaaaataagttaattcagtattttgaagaaatcagagtatttgacttagtaatatttctttccagattttttctaagtaacaaagaaatttatttgtatattgtgatatgattaatccttcagttaatctaagtttagccatataatgctttctttctactttgtctcttactcgaataataagaaagaaaaaatttcacagacaaatatttctgttcttccagtgtcctgaatacagagtaggactgtaagaattttaactaattcttattatggggtattatgcaaagcaaaactatactgagagtcagttgttttattctcaggttctgtaaactgagactaagttgtttggttctttaagtctcagtattgttttgtgtttcgttttgagatggagtcttgctctgttgcccaggctggagtacagtggcctgatctcagctcactgaagccttgatctcctgaggttaagcgatcctttcacctcagcctcctgagtagctggggccatagactcacgcccccacacccagctaatttttgtatttttttgtggtgacagggttttgccatgtttcccaggctagtcttgagctcctggcctcaagcaatctgcccgcctcagcctcccaaagtgctgggatttcaggcatgtgccacgtcacctggctaagtctcagtgttcttatctccaaaatgggataggcctatatccgtggaaatactgctgctgcagccctattccagaccaactaaatcagagtctctagaggcaaaactcagatatacatgttttctaaagttttctggatgattctcatgttgggagtcatcgttgagaaccactgaactagattatttataagattcattctactcagagtgtggtccacggactggctgccaatataccaactgtttattgccagtcctcaagtacatgtgcagctagcttgtgccaaaatgtaaatcagctaaagcactagtgtgctatttagtttggttgcattctttttttggtagcaagactattgattaaggaaatagtaaatttaatttacactttggtacaagctccttatttggtttcagaccagcagttggagtagcacttctttgagttctttcctagttcttaaattctgcgactgaatatataatatatggttgtttaaaatctgctgatctacaatgttattgcaatactactgaacattataataaacagaaggttgttatttagataatggaaatggaagaatttggaaggttaaaaatgttggtgacaattttttaaagaaaaaatgaaatgtttaggtgccagtcttctaaaatggaaaaatgtttcattcaaccaccatattatgactaatattttatggcataatttactggttcagtgcaccattctttctttattgttgcaagagataattgaattacacatggctaattattaaaaatgattgcagggcagttttaaaatgtaaaaaattccatgtgatatttaataggacttcaatagtggtagctgaagaaaattaagaaaataattgctcttaaatatatcagttaatcagtaaacactgttctgcaaataattcatatggaaaggattgtttatgagtagactgataataccaggctcacgagaaagttttgactattatagaaaaacatttaaaattcatggtatgatgtgaaacttttaacttgtaacctttatttttgaagacagtagtattaaaaacagtgttgggtgagaattaatctattttggatatgtgtttgtgtcaggtctctttcccagccttgtataactttatttgttaaaggacgaaaaagagacctgaatattatactgctgatttaatacaaagttcattctgaacccccactgtcaaaataaattaaggtcaattttgatttctctcaatacgtttgaaactcccttttttattattatgatttcatttatagaatattataggaaattatttgctttaaaaagtacctcaggacaagtattcacagattgttccagatcagcagttacagctctttactatcagagattaatttacaatgtaatcaggattctccttattcatagtcctgcttattatctaccttgagttcttgttcttagtaaaaatgcattgttcttttttcaattatttggacagtgaaggtaagcctaataacagatattgttggcctaaaaaaactatgaaatgtatatatggaaccccagtataattaaaagttttgaataggctatatgatgggttgactccacagattttctgggtaaacagctgactcagttagaccatgtgtgattactgtcctttgcaaaaaatagttttcttccctttcatctgactcattcttagtctttggtttttcctaattcatttagtgtgttgtaaaccccatcttccaatcatgatgaacctccagattaaaaaataataatgataaatgccattgtttaaatgttttaataaattgtagaacctgagattatatatatttatgaattgttatggatattttcaaaatatacataagtagaatagtaaaatatatccctacgtatttatcaccaggctacagaaattactgacccatgtctaatctttttccatctgtacctttccccactgcagtatattttagacatgattccattaattcataaatattcctcaagggaattatcaaaacatagttggtgaactagaatggatgagctccaagaaccccattaggtaatgaggaatctttgctagaaagaaatacggaatttctgttagagttcaaagaccatgtcacataataactacattacttagattctgtgcagtgtatgaaatgccttcacagcagctccatagtaagaacctgaaattatcttctttctctaattcttctatataaatttttaaagtagtgtttttttgtttttttgtttgtttgtttgttttttaaactgagtttcactcttgtcacccaggctggagtgcaatggcaagatcttagctcactgcaacctccgccttccgggttcaagcaattctcctgcttcagcctccccagtagttggattacaggcgcctgccaccacgtccagctgatttttgtatttttagtagagacagggttttcactatgttggccagactggtctcaaactcctgacctcaggtgatccaccagcctcggcctcccagagtgctgggattacaggcgtgagccaccgcccccggccttaaagtggtaaattttttagtttgcataatactttgacttttgttgacttaaaattccttatagtgaataacagtataccaccacagtgagcaatgatgagcttaatgagggacaggaatggaaaaattacagttttactggtttagaagttcagacacagtagctaacatattgtctaatgagtaatattttgcaaatattgaggattattaatttttaaatataaagatgtagtaatagttctttggtaagtctaaaaaataagtagaccatctacccttttatttgtttcaaagtgtcaaaacaaaaatagaatcaatggtgagaatggctttgatgaaataccagtgaggaaggtcacagtaaattattatttcatgacaaacaaaaatgtaaattcttttacattgcaaatataatattacaagagaatagcaaatttacagtatacacttggagaatcattctaaagcagttgaagtctccccaacaccacacttcaattttttgtgatctgtggtctccagagtaactattataagtggttttcccagattctggaggggagaaaataaattaacaatggattgataactttattgttcaagctatagtaattcttttcactgtgagattttacataattcactaaaattacccttgttttgtaaatatggaaccattcaacgaactacttttgaaaatgcaaatattgtactctagctagtacaatgagctctaggaaatcagaatcacattttgaaagaatcttgaggtttcaaagcctttcaaattctctcagttgagaaactgttacagtgtaaagtatatgtacgaagctttcccttttaaaagacaataaaaaatagttttgaattgaagagtaataggattagtaatctttataaaattaaagagccagatatgcccattgttttcagctaaataatggttccttaaatatgtccatatcttaatccccagaacctgtgattatgtcactttatatggcaaaaaggactttgtaggtgtgattaaattaaggatcttgagatggggcgattatcctggattatgtaggtagtctcaatgtaatttcaagtatccttataagagggaggcaagagaatcagagtcctaaagaaatgtaatgacagaagcaggagtcttagtcagtgagagagagattttaagatgctgtgcagctggaggatggaggctcagtccatgagccaaggaatgaatgcaggtggctcccaggagctagaaaaggattttagggaatgtattttcttctagatcctccagaaggaacataacctagctgacaccttgattttaggacttctgacctttagaactcttaagataataaatttgttttcctatcagctagtcattttgtcgtcatttgttacagcagcagtaggaactaattaacctatgaacaatttttaacctatcggtattgtaagtagtacttctaattattcttttaaatatatctttctttgaaaaacttattcttctttaggattcagacttttcatgtactcagggagaataaatgagtcctgttctaagttacttttttctcttggagatatcacatagttgagttcatggcctagaagattttctgatgtttgtacatgcccatgggagaatgtgttatcataataatttttagtatgcagcctcttgacttgatttttcacttatagtgtagaccataatatttgtcaatttcttatgcatctactgtgtatccagcattgatatagacatcttctgtacataatacattccacaataaccttgcaagtttggtattatttttattttataagaaagtatcctaagtatgacccattagtttgaaataaattagtatttgttgtgtaaatctttacctcccagtattgttgtttaagaattaaaacaggttgttcagagaagacgaaagacttttttttttttttaattattactatactctaagttctgggatacatgtgcaaaacctgcaggtttgttacgttaagtatacacgtgccatggtggtttgctgcatccatcaacccatcatctacaataggtatttctcctaatgctatcccttttctagtcttccaccccctgacaggccccgatgtgtgatgttcccctccctgtgtccatgtgttctcattgttcaactcccacttatgagtgaaaacattggttttctgttcttgttagtttgctgagaatggtttccagcttcatccatgtccctgcaaaagacatgaattcatcctgttttatggccacatcatggtgtatatgtgccacagtttctttatccagtctatcattgatgggcatttgggttggttccaagtctttgctattgtgagcagtgctgcagtaaacatacatgtgcatgtgtctttatagcacatgatttataatccgttgggtatatacccagtaatgggattgctgggtcaaatggtatttctgggtctagatccttgaggaattgccacactgggagaccaaaagactttaaagcactgttaatttaattgggaagataagaaatactattcatattatagttgagatttgagatgggctttgaaggatgaataggttttttgacagcaattggagggaggatattccaagtgaaatgaatactgagcaaagactcaaagatgagaaaacatggactaggttataggaatgtaacagtttggctagtatatttgtgtagggaaaaaataaaagatatgctggaatgaagtgaaaaggtgtttagatatttccaattttgtagaattttatttttaattcagttggtgtactaattgtaaaattaccttgaccaaactgatatcaggatgacaatgtcaacattgcacactctttgaagacagttctcatttgctgaatgaatgaatgaatgctgacccacacattttcaaggaaaaccttggttatgttcaatacatgtattttaaaactgagggaagtatgtcctttctgagagattgtcatcaacatggataactgaaaggttttgatgcttaaaaggataagctccaaatatctggaacattcacttgcatatatcactacatttcccaatagtatttgttaaattaaaccttaggtaataaagtgctagggttctttttcctgttctaacgaagtgaatatcataaatcaattcatttgttttgctgatttatcacattcatgggtgctgacttttttttttaatctgctcccaacttttgctttatcgtcattgaaatatgcttttcttctggtggtgaaagtagtatgtgaatgtttaatatgtaattctataatactgtgaattctgcatatcttgttctgttttgctaaaaaagtgaaaaaatatttccctgtgatgtgaaacagccattgaagtttggtgagtttatgagttggataactattataattactcagtgtatcttgctgttgaaaagcataagttaaaatgttttcatttattctacttggttgtagttataaaattatatggcccaataaatctgtacaataaatggccttttaatatatatattttaatttttagaaattaaaagattacagaaaagtccaaaggttatgtcagaattatcaaacattaatatttttgcatatttagctatccttctaaaattacatcaataatatgtctttaaaaatagaatatttcaaataaagttgaattttttttttttttaccaccatctccaattctgatcctctgtcttgtataaagtaacctattataaattgggtatgtatgttcctagtacttttttggtatttttactcatttgtgtaaccatacatttttaaattttttatttgaagagatggttatcatagtgaatgtattctacaacttgcattttttcactcaataattctgatatctagccatcttgatacttccagacgtagttcattcttttaactgctatgtagcatatatctataatatatctctaacagattttagattgtctgcagttatgagcagttcatctgtgaacatttttcttcatattttcttatacattcaagcaaatgtttttctagtaggtgcctagaaataaaattgcatggcatatgacagtgaaaatctttatattgttaatgattaatgtactttaaccaatagttttttagtcataaatgactgtagactcttacttaatattatagtttttaaaacttgtcaaattttatttagttaggtcacaaccatctgttttatcaaggtggatttggtctgttctatgacaatatgctgtgttcttaacaatcagcagttatctcataatcttataactactgaggaaagcagtgaaataaatggatggatgcacagatgggcaaagtctatcactaccactgaaataattattttaagtacatgccatatttaactgtgtcaatacattttattttgagtttggggatgccatcctagaaactgaatatacatgtaaataattaaactgttgtatattattccaacaagtacatttagggtactgttgtaaaacattttcaaaattaaatgtcaaatggaaattcaaattcaataaaattaaggattataaaactaaagctaagcatgttgtatgtaacagaagttattctggaaagtcctgcaaaaattagaatttgcattcatattgtgaattactgtactgctttaaaaaggaacaaggaaggtatttatgttttgatgtagaaagatcttgaagatctatttaagttacataaaggcaagacaaagcaaagtacatattgtcctaatatttgtgtaaaaatgaagtatttgttttaacttacatatacgtgaagtgatctctgaaccaaaaactaataatagtgattatgtgttgtgaaggttgggaattgggcagatagatacagaacaagagagaaactaaaaaaaaaatggattctgacagagaaactttttacatacctttttaaaaataccttttcacatttgaagctttgagtatattgccgtttttttaaaaaagtaatctataattttaatatttctattgtatacaattgaaaagtatttttaaatttcccatgtatatggaaaaaataaattagtaaaaacaatcatgagccaaatgacaactttggctgaaccctgtactgatatggaaggtaataatgatacgtgggttagtaataaagcacctctcctttggtaattgtaagggttctagttttcaaaatggcagttcatgactttccacagcctcttcctgtggtgaatttctggccagttggatgacagaaatacagggcttgctaaaagttaaagtatcttggcagttctggaaagagaccatctaaaccaccagccaatgctacctcagcaatattaccaataaccagttgttcactaagaaccggtcagggcgcggtgtggaccataggtatctttgctattctggactgttagtttgcttcctgatgtgcctctgcttatcttttcttcctctcagtttcattgggatcctcagctattgagttctgtcctggtgcattccagccccactgcaaaagaataggaatgagcatctaacacatccatctctgaatgcagaagaggttgaagtataacaaccttattcattattattacttgcttaatgaatttctggatttttattatctgtcattaaatatccaggacaggtgtcatccatttatccttatatcagttcagtaatctattcagtgaatatcagaactgggtgacatcctgattttaccacttactggctctgtggcactggctatggttttatcctcacagagcttcagttgcttcatctttaaagtttgaccaatagtaactaattaaacaggtaggtggaagataccatacgtaaagtttctagactaggtgccaaagcataggagtcgctcaagagatggtagctgaaaaaggaagtttcttacagtttttgatggtgtatggagtgacagtattcaatgcaagtagtgtctaatttgtgtagtctaattagtggcattttaaaatcccattgtaggctttaaaaaaatctgagggattgaatgttgttcttcttactatattagaaaagaagattaagaaggaacaaaagtagtttccttttaatagatccattaatggaaaacaagcagatttctttggaatgaaaaataatggaaagttcataggcaaatgcttgaaaagcatttttccccacagaggacagtttagagattttaagaaataagagtctcatgtttgtggaaaattagaaataatacctccttattctgatataattgagcaagaattgaggactgaatttccatctctgtctccccctccccgctccctgaacagagagattttgcctttcaaggtctcagtctgaggatttttgcttgatataggacctgtattcttttctcattctgttactgtgatatttttagaagtatccattttccttctaatatgcccattctgcccgtctttgaagtacctatatctttaaatgatgcctgtattcaccagtctgaagactcttctgactgggttttgcagggagcttgtggtgcatggggcatggggcattgactccgccaaggtgctttgcaggctaggcataacttatccaggtgaggacaggtactagaaggaagtgagaagaataatgttctgtggccctttcagaacctcaagaataccttggcagatccaagcgttctgcttatagaatgttagcagtagtagagcattatttctgtaattaggcacataggcaagagttaagtaaaaagtccggaatattaaccttaaaaaggaagacttggtagcacagaatatctgtgtctcagggggaaaaaagccagtaggcatgttctgtgacacctcaaaaaactgtaaaaggtggaaagtagtacaatttccaagaattagttagctcttcaaggagagtgagttccccaccattggtgttactgaaggaaaaagaagggcaaccacttttcagggttattgaaggaatttacccatcagattcattttgatgtcaataaccactaagctctcctctgtcttaaagattaaataatttttcaaattagattcattttttaccttttatccattggacagtttttacatcagtgttttatttagcatcattctgattgttgtttactttttaaaggggagaaggagaaaaggggagaggaaaggaagaccacattaaattcccaaataaaagaagcaatacaatctgggaaaaatagcgagaccttgtctctactaaaaaaaaaaaaaaacaaaaaaaaaaaaagtgtgcacctgtactcctagctactccagaggatgaggtgggaggattgcttgagccaggtttttgatgctgcagtgagctctgatcatgccactgcactccagtgtgggttacagaatgagatcctgtctcaaaaagtatatataaatttaaaaaaagaagaaataaattaaattttaaaaattaaatgtaaaatgttatgaaccttcccccgcccttaacaaaattttaagtgtataggacattattgttaacacaactttaagcacagtgttgtacagcagacctctggaacttcatcttgcataactgacactttatacacattaacagcaactgcttccccacctcagttcctggcaaccatcattctactttctgcatctatgagtttgactactttagacacttcatcagtggaggcatgcagtatttgtccttctgtgactggcttatttcacttggcataatgttctcaaggttaatctgtgttgttgcatacgatggaatttcattcttttaaaaggctgaataatattttactgtgtgtatatcacacagtaaatccattttatccattcatctgttgatggacattaaagttgtttttacatattggctgttgtgtacaatgcttcattgtacatatgggagtgccactatctcttaaagattctgacttcagttcttttaaaaaattaaacacagaactaccatatcccagaagtgggattggtagatcatatgttagttttgtgtttaattttttttaaaagcattttccttattattgtttggatatgcatttccctgatggttagtgatgtccagcatcttcctatacctgttagtcatttgtgtgtcttctttggagaagtgtcaattcaagtcctttgcccattttttaattgagatatttggagttttttgctattgagttatagcagtttcttatatgttacagctgttaaccccttatcagatatgtggttagcaaatatattctccgatcttgtaggttgccatttcattgtttcctttgctatgcagaaactttttagtttgatacagtcatgctccttgtctgttttttcttcttttgactgtgcttttgatgtcatagccaacaaatcgttgccaagacccatgtaataaaaatttccccctatgttctaggaattttacagttctgggtcctttgtttcagtccttaatccatttttagttggtattgctttttaaggaagccattattttaaaaataaaaatgaaaaacccatctcctttttatatatacctcctcttgatattttttggatagatataccttcactgtgctaactagagagaggaagtactcttttgcaatgcctgcgaggcataactaaacataaaggcccttttctttcagaaaaaattgacttcctgatgaaaagatcctgtattatttagtgtttccagaatatcaagatgataaattatcactggaaattatacatttccacagtcatcattggatagattataattggcgatattttgtaattctgtatgtctgggaatatgttaactgaaatactttgtaaaaagtataagactcataggaatttacttttctgactttttgtttacgagctttacaccacataaaattaagttaaatgactacatgcttcctataaagcatgtctgaaacccagccctctctaatcatggtagccatttaaagtgaagctgaagaggagccatgctattattcttcctttcccccagccgtttcaagattagattttgccagagaaataacagacacatctggtataggagacacttataacaaatctttctatgtagagaaccgttttattaattgtgccttctaattcaaaatatactacaaagttaaataaatgtgattagaaaggttctttgtgataattttaagtactgtttgattgggagatgggctgatggagaggggaaataatctagatttatttcatcagaattagtcctacattgattattctgggtaaaaaataataaattatgtaagtttaagaactattaaacttttaagattaacaatgtagaatacaggatcattttgtaggtggctctaaattaagcctttagattgaatcattttatgagaccaaataatcagtttaaagtaccttatgctttacctgatttaataatcaacaaaacattttattctaaatttattgtaaagcaagatagtaattggattttttatccccaagaatcaactgctggaggtatcttgtttactatattcatgtagccagaagtgaaaagtaactgaagactttattgttacagtcctgtcttatattctatgtatgtctgcaccctgccttaagtgtggttgtttggaaccgaaataacatctttcttgttggaaaatatggatgtatatgtcttatgtgcattaacaatgcttctgaaacatgaccttactaaatatatcaagcctttccatatatcagctttagtatttatcaataaatatatacaggaagctatgaaatatatgtatagaaataaatatttaatatttagttgggtgactatatttgtaccatattttgtgagaataaattttctttggattataatagtaatgtttattttagaaaatttagaaaaatgcttttgtatttgaagtctcagagcaagtaaggtaaaatgctgtaaaatttatataaccattgaaatgttaggctcacaacaaatctttgataatctatattcagttcagcaggccaagacactggggaggagaaagggtctgtggtagtaaatactagcactatttagtcacataattttgaaatgcggcattatttttgttatgtagatctagaaaataggaaaataaaaatcattaaataaatagcagtaacagtaccgacatttttggacattacagctctaccagttcttagctttctagttgacaccattactatttatttatttatttaattttgtaacaagaatgcagatgccatttatttggtccataagtatagccattgagttttacaaaacatcaactataaataacctgaaactataacaatacacaaaaattggcttcatacacagacataccaggcagtacaaactgaaaacgtgagtaaattaacattgttttacattaatatacatagtgccatttaacatttaaaaacaagtttcaatacatagcatttgatacttctttgaatctgtttcagtcagagtatgaaaatggttagagctaggctaaaattaatttttctagccaaaaataaaggcatgatatttataaccaggtatcaacttaaccacaatattttgaaactgttaatgatacctaagggtatttacattaaaaaggcaacatgcattgtgttgttttatctcatgactggttatgcacatactttgttcaaagggtttttaaagctatattcctactttcagtatagcatactgcagtgtgtctaacagttctagcaaaatgaatgctttcagagggagcagaatcattttcaagtcactggtgtccattttttcccctttggaacaaaggacataacaaataatctggttctgcctagataaactaagtagtaagagggctctgtttagaggcatttctgttcaatctaatgctatgacatcatccagctcttccttctgttctatacgtgacctctttgcactgagattctctttctcgtctgatttcctcttgcggcttctctcttcttcactgacgtcagcattctttgaagaatcttcttcatccgaatcaactgtgagaacatcatcttgctcttgagctgtggaggtggaaggctgacctccatcattactgccattggttatgcttttggcagcatcttcagcttgttttggccccactttttctggggcatcaccaacacttcaaattcaacatcctttcctaggtcttcactatgaaggatgttgatcaataaagtatagtcctggaggaagtaatctgcttgaagccagctgcaatttctcattccaaattctgacaacttcttgtgattattagcttctgtctctcccttttcagaagatattaggattgttcctttcccatcttcaatttggacatctggtgctaccatagcaaatttttgtttcactaccttgtctcgtaaggtgagaacagtcactttatggacattcagccgtacagtcacctggcttgctggcacatatgtaacaattggggttgggaggatccagtgcacaaggcacaagaaacttctttcttggatttgcttgtttattcaaaacaattgttctgcagtggtctatttttcctgataagatcttcaatctttccaatactgtcaacccagcaatcactgcattagtagtagcaatagcaggaataatattccctgccactgatttgatatcaaatctactcttcatattcatactgaaaatatgcatcctgaggtttgtagcagaggtaacaaaatccattgcatatgggtcatccttatcccatgtgagctcagctccatcccccttttctgctaaatgaactctcagagtctcagtgctgtgagctccttaagaaccttgtgctcaccggcttctcccacgtcgacctgattgatctggttactattgatgtcagcaacctcaacagtttttgtttcaaaagaaacatgttggaagatcaaaggcacaggttgccagggaaagtgcactgcagttttacctgaaagctaatatggttgcctaccatgacagcatcatgaaccctgactataatgtggcatatttttgacagtttatattggttatgaatgctttagataacagagctgcccaaaaccgtgttaatagagtgtgcctggcagctgttgttcctcttattgaaagtggaactgctgggtatcttggacaagtaactactatcaaagagggtgtgaccaagtgttacgaatgtcatcctaagccaacccagagaacctctcctgactgtacaatttgtaacacaccttcagaacctatacattgcatcttttgggcaaagtacttaagaagtatctcctgacagagctgaccctgaagctgcctgggaaccaacagaagccaaagccagagctagaacattctaataaagaaggtgacattaaacgtatttccactaaggaatgggctaaatcaactggatataatccagttaaactttttaccaagctttttaaagatgacatcaggtatctgttgataatggacaaactatggcggaaaaggaaacctccagttctgttggactgggctgaagtacaaagtcaaggagaagaaacgaatgcatcagatcaacagaatgaaccccagttaggcctgaaagaccggcaggttctagatgtaaaaagctgtgcatgtcgattttatttatttttgagatggagtgtagctctgttgcccaggctagagtgcaatggtgcgatcttggctcactgcaacctccgcctcctgggttcaagcaattctcctgactccgcctcccaagtagctgggattataggcacccaccacgcccagctgatttttgtatttttagtagagacgggctttcaccatattgtccaggctggtctcgaactcctgaccgcaggtgatccacctgccttggcctcccaaagtgctgggattacaggcacaagccactgcgcccagcctatatgtttaactttttaagaaattgtccaactgttttccataatggttgtctcattttatattcccaccagcagttcatgagaattccagttactccacattcttgacaagtctcggtatgaccggtcttcagttttagccattcttacaaatttttgtgttatctcattgtagttttccttttattttctctaatgacaaacgtctttcatcttcttatctgcatatctcttttttggggaagtgtccaaatccttagttcatttaaaaaaatggactggctattttctcattaggttgtaagatacacattttttgttgatatgatacaaatcttttgttggctatacatttcacaaatttttttcctttatgtggctttccttttcatttctgtatcttttaatttcagtgaagtccactatattgatgtttgtttttgtagttcttgtttactgtgtcatatttaagaaatctttgccaaacctaaaattactaggattgtttcttctataagttttataattttagctcttatatttaggtctgtgattcattttaaattcatttttgtatatgatgtgaagaatgaagaaagaatgaagattcccttaaaaaaatggctatccagttgttcccatactatttgttgaagaggtgatcattttcttcattgaactatcctaccaagtttttctaaaatcaattgatcatatttgtatccaagtttttctaaaatcaattgatcatatttgtatagttatatttctggattcactattctgttccattgatctggatgtctgtcttcatgccagtactatactgtctggattactgtaacttgataacaagtcttgagataaagtggtgtaaatccttcaattttcttatttttcaatttgttttgcctattccaaattatttacatttccatattagttggtcaattcataccaaaaagtgtcctgggattttgattgggattgcatggcatctgtatataaatttttggagaattgacatcttaacagtagtctttcaatcatgaatgtggcatatctatttagatcttatttaatttttctcagcagagttttataatttttactgtatggtcttgtacatcttattgcaaatttatttatatttttgtgctattttacatggtattttttatgtgaatttctgattatctgttattagtaatatacaattgatttaggtatattgatttttatatcctgcaaccttgctaaactcattaattctcgtagcttttttattagattcttttggaatttctacgcattcagtcatgctgtctgtgacaaaagacagttttacttcttgctctctaatctgtgtgcctttctttttcttgccttattgcacaggctagagcctccaagacagtgttgtgtaaaactgatgagggtggacatccttgcctcattcatggttttagggtgaaagtatccagtctgtctttcagtaaagtatgataccagctgaacatttttacagatatccttttattagtttgaggaagttcccttctattcccagtttgccgagatttttatcatgcttctagtcccagtttgctgagatttttatcatgcttctagtcccagtttgctgagatttttatcatgcttctagtcccagtttgctgagatttttatcatgaattgatgttggattttgtttatgtgcatgtattaagatgaatacgtggtctttagcttatttaataaggtaagttacattgacttttgcatgttaaaccaatctgtatccttgggataaactacataggtatgataattgtcctttcatttcactaaatgttgttaatttttgcctctataagggatttcatgtctgattttggtatcaaaggctggcttcagagactcaactggaaagcgttttcttcaagagtttgtgttgatgttttcttatgttggtatttttggtattggtattttttttgtttggtagaattttctaaagccatttgggccttttgtttatctgtgagaaagatttgttttcattttttgtgcgaaggttttttatctatacatttaatagatttaaaaggttattctgtttagctatctgtgagcttcgttaatttttgtgtttcaaggaatttagcaatttatcaagtttattggctacagttgcttataatattcttttattgtctgtagtattctctcctttgtcatttctgatattaataatttgtatcttccctttttttttcttattagtctggctagaagtttatcagttttatttttatttatttatttatttttggcacaaagaactagctgtggtttaggtcactggtgttagaactgccttcttttctaatatgatcgtgtagtgctgtatgtttccctaaaagcactgcttcagttacatcttacaattttgatgtttttgttttattaggttcaaaatgcttttctactttcctttttgtttttttctttgtcctgtgggttacttgaagtgtgttatttagtccaagtatttgtggacatttcaaatgtcttttctgttattttaaatttaattctgttttagtcagagaatatattttgtatgatttgagtactttcaaatattttgaaccttgttttatgactgagaatatggtctgtcttatcaaatgttccatgtacacttgaaaagaatgtgtatctgcattctggatggagtggtctctaaatgccaattggctaattagttgatgatattgttcaaatttgctgtatcttagtgattttctgtttactatcaattgttgtgagcatgatggtgaaatctttaattatacttgcagatttgtctgtttttcctgtgagcttttaattcatatgtttttaaaactctcttataaaggtacaaaattgtttaggattgttatgtctttttgataaattgacccctttatcattatgaaatgatcctttttatctttgccagtattctttactctgaaatccatttgtcatgaatatggctacaccagctttttttgatttgtgataatgtgatatatcttttctcatccttttgcttttaagttatttaatgtttctctcatttaaagtggttttcttgtggtcagaatatagttgaatcttgcttttttatctagtctgacaatctcagccttttctatggtgtgtatggatcctgataattagtacattatcttttaatgtgcaaatataaatgttagtaattataaattaagatttaagaatttgaataatttgatagatcccatcaagtaatcttattcctaaaatttctattttctttatttttcgaactttgttttatttagacttattatttctaggttatcttaggccaccaagaaaaagccaaaattgggaagtaaactgggactacattagaaataaaatggcctccaaatatgagagattatgctacagagactcctgtaaaattttagctataaaagggtaaaatggagaatggtacccacagggtcacaaaccagagtcaacaaatgttgactccagtgttgctttctaatatcttctgtttgttattgattttagactacttgctcttatatcaccttgggagcttttaagaaatacagattccccagtcccatggaatttgttataccctgtaatctattttaaggtaatgtaactttccatgtgattcttagattactctagggtcagaaatcatggtcctgccctacttatctgaccactttaatctctgacttttctgccactatcactttctcctacagagtcttggcaccattacaggaaaaaacctctgaggattagtcaggtgtgatatacctagaatattatactaaacagtcttgacatgtatggagctttagctttgactgtgctatatgtaacattaggttagtagagatcaaatcacctcaaaccttcacttttaacattatccttcacttccttttaatatttcttagattgtggagtgaagaactctgtctcccatatggtttaatttagtatgctatattatttttattaagcaaatttgtgtgtctgctgtatactgggtaataatggtcatcacctttctttcagagaaagaagtagcttttaaacaagttatgctctcctcccccaaaaagtcacgttaattctacatgatttttttttttcagttttcgtggtttgattggttccagtgttcaattagaatgtacttaaatttatgttgcctaattcaaatagattaatggggatgaggcagagtaactcacaatagaacaaacagttttgagttactttgccttatccccattaattttatcaacccataccttttcataatgatcataattttatttctggcataggaaaataagccaaaaatattaatggatttaaaaagctaatatatagggtatgtaaagatcaacaaattattttaaagtagatattaaaatgtctattgtatagtaaatgttcagtagtctgcaaaataaagaatattctacttgagaatttttttcttacacttgtttcatatgattaaaattcagtaaaacacaattaaaactcaaattatggtcaagcattagtttttgtcgattgataacaactgtccagcattttactggtcattattgagaatatcaattatcattgcattgtgggcatgttgaagtgtcactagtaaagaattgtagtttacaggatcctgaataatggttcttttttgttacacaagacaaatgcaaaggaagacagtttttggaaatcgatgtttaaaaaagaacatctttagaatattaatacctgtgactaatttttaaagattcatgaaaaatacaaattcaactgaaaagctataacagtttctcagaagatacaaagctgtaaaatataaaaagttttaggccaggtgcaatggtttacacctgtaatcccagcatcttgggaggctgaggtgggctaatcgcttgagcctaggagtttgagaccagcctgggcaacatgctgaaaccctgtatctacaaaaaatacaaaaattagccaggcatgatagcgcacacctgtagtcccagctactccggaagctgaggtgagaggatcacttgagcctgggaggtcgaggctgcagtgagccctaatcatgccactgcactgcaggctaggtgacagagcgagaccctgtctcaaaaaaaatttttttttaactcacttttttagtcttaacaatgggtagtgtacaatctacttgaacttcagtttttaactagtaagccaggactggaacttgtagtttaatcagaatttcttcatatatacgtgaatgttcctagatgaatatctttaacatggttcttgaattcttggttgtaccccaaaaatggtttcagtttaaaagggtgtggggcaatgaccatgattcagaattaattaatgttgcattttcacagggttttgtaacagtttatgctcaagaacaatgtaaacatttcacttgtgctttccataatgatggtacagcatgctttaaagaggaactgactagccttaggagacgtagtggttggtggcgagcagtgaggaagatgggaaatccagttagtccaatagaatcagtgccatgagttaaagggtaatggatgtgatgaccagaataccctcacaactagtttataccattacgttgtttttcacagatctaaggtacatctaaaattccaattaatggggtacaattaattagttacatggaaaagataatattctatatctgtcttcttaataagccaacagaaatgccctctagaacaccgattctcaaagtgttcctggaccatcatatcagcattgggaactggactggcaaattcttagtccttggaattagtagctagggaatgtgggaaggcaggaatttgtattttaacaaatgctccaagtaattctgatgcatgctcagtttgagaaccactgctttagaatatgatgcatatcaaactccagtaaaataatagcaagttttcagcattgctaattctaattttcaacagctgctgcattaggttttcgttaatgatacccaaacccagctggagttgaatcctagttacttcttattctttttacttactagtgagtggagcaccaggtgcagttgttgaagtgtgaaaataatttagctttgtagacagttctggcatttcttgattttgaaaatgctttaatcttcttggtatgatatttcaacaatcaaagcacatctattttaatggcagtatggacttgtgctaagaatttaaggaaatctctgaattattcctaccagtttaatatcaaaattaatattttagctgaattacaaagcttatatataatttactcctattttatttttccaccagtatgtgcattaaaaattttttaatgtcttcctgaataatttactttcaacctttttcacatcttctacaatattatgtttagttttactttggaaaaaaatgctagcagagattttagttaaatgcattcttagtagtaaggtccagctgcgtgctttgtgagttgcaaaactcatgagtccttcaaaaaacattttaaaggcatgtcagtaagacatgaaactagcatttatctgctgcagtatactttgagtatctacaagtggacaacatggtcaaaagcacttaaaatgtttaatagattagtacatgatcttgcagtgatagtgcagatttgtttttggttgtattgcacatatgttataggtaatgttggtaatacagatatttagaaccaaaagctgatgaattcaaaattctcttttgatgtttaaaaataaaaataaaattctcttttttttaactgtgtaccttcatgatctcatttactccttttacatcagctgatgcctttgtgttgtgactcttaatttctatctttagttcagaactttctcctgagatgtatatcttctgtaacctacatattactacctggatgttccatgggcacatgaaactcactgtgtctgaaactgataatccaaatctctccctcatactaaccctgtaaatacatatggaatcagagttacattaatagcctatttttcattattataataggtcaaatagcctattttggccattaccctagatgtttgcacagggcttcattctccattgaaattcctttctaatatttctgaaactcttctagagatatctcatgtgggtttttttgtttgttttttaaaaagcagactcccctctacccataagaatctgcttggttacttccttgtccatagaacaactatctctaatcaagcatcatcatctctgctgcttccccaagaggaaatgccagaaagtatgggagccttcatggtgctaagattgatgtcacatttcatgtagaaatggagaaagttctcttatgtcctcagtaatgtcatactttatcacttgtgaacctgctttatgtgcctgtgtgaagaaatggcaaactatataccagctattcatgcatttcttcctctagtatgtttttattgctaggaagcaactgcccaccaaggattaaatttctcaccacaacccctgcatctaggtagggccatatgactagtgtttgccaagataattaagaaatggttgtgctttctgcactctatcggccagctggatcaaaagacttcaaggtactgtggagaatggcaaagtcagaagaggaaaggagcataattccttgaattactgcataaaaggctgtctgccaaccagaaacactcatgttggtacttgagcaagaactaaacttcttgtgtagtaaacaatcgagatttcgttacaacagctgatgtttccctaattaatacagtgccccctttatattacaaagcccttctttgaaacagctccttaatcatttccctgcattccctttctctaaaaactcaaacacataaatatctggaaattcatggggctgggagggaacagatgccacattacattctaatccagaacttttctgccattgtgccctccccatcctattccctagacctgttaggcttggatattgttcttacacaagcttgaaataaagccttatgaaaatgggctcttccacagaccagctacatacttgatttctcagtttgaacttcagtgtagactacaaactatcctgaattcctttcttcatccccatttattcttccttccccaattctcaaattcactgaatggtaccatcttcctcctcagtaaagaagcctagagacagtaccttagccacttccaattccgtcttctactcttgtcacctaagcctctaacccattaacctatctccttccagtccccatgcttcttccttactgcagttgctttccttcaagtcttaatcctcactatgtcttcaggccattgatactcaactgtaagcgttatcactctataaaatcttgcattgtagaagtcccgcgtgggttacttaaaactctttaaaaaaatggctctttatcgcttatagaagttgttctgaaagtgcagtccatgtaccatagggatgcttaagactcctttagggctttcacaaaatagttcacaatcattttcataataattctaagatgttagttgcctttttcactagttgacatttgtccttatggtaaaaagcattggtggtaccaaactgtactagtaggcattgtgttttttgctgcctttctctaacagcccaaaccctcaaaagccattttcacataagaatgtccgtcagaaagcaataactttattaaatattgactattttgtgtatgtccttaatattctgtcacaatatataaagtacatcaagcacttctgcataccagagtacagaggttgtcttgaggtaaagcacttgtgtgattgagttgtgctgtggtttgaatatggtttgtctctaccaaaactcatgttgaggcttggtccccattgtaatggtgttgagaggtggtgggacctttaagaggcatttggatcatgaggaatctgctctcatgaaagaatcagtacagtcttgagggagttagtgagtcctcactctctgaggactacattagttacaatgagatcaggttgttatgaagcaagattgcctctcgtgtttgcgctattttctgcatatgtcagtttctcttctattcctccatcattttttgatacagcatgaagcccttaccagaagacaacagatgtggctgcccagtcttgaacttgccagcctaaagaaccagaagctaaagaaacttctttataaactacctggtctctgtcatagcaagagaaaatagattaagacaagttgcaagctcaacaaggcaatttttttcatagaacactgtttttacttgaaagaatgatcaacacacaaactatgtttattcagacttgtgtagttgggagatattttctcaaaaatgaatgaagtgaacttgtcgctgtaaggaaaatagttgacagtattagttgccaattataaaattcaaaaaaacttgtatctgccgctatgaacataacagtttcccaatacttagacttctctgagattggtggtgttataatgaatgtgattttttaaattgtataatttttattatacaattctaatgtattaatatttggaggatctgcataactccgtataccaatatttttcaaatgacagtgcaaagtatatcaatataacagtatatattcactgatatgaacttgaatagtgtatattcattaatatggttttctatcacattgcagttaacttttaagaaattaacactaggttttagtgtagaattgaaaaagaatatttccaattatttgaaaaggctactaaagtactccttttccaactgtatctatatgagtctgattttcttcattgactccaacccaaataatatatggtaatattttgaatggagaagcagatatgaaaatccagttgtcttctattaagccagacactttataagatttgcaaaaatatgttacactaaatttttttgcttttggaaaattttttcacaaaatcatgtcatttatgctgacatgtcatattgttattttaaagtgagttaataaatgtttctcaattttaattactaatgtgctgttgctagatgtaacccacataaaccaaagctctttggtgtccttaacaatctttaagtgtataaaaggttctgagaccagcaagtttcagaatgctggcttataggatatggttcatattcctaatatggtgattaagacactgtgatctggcttctgcccacttttctgccttatgttttaccttgcccttaatttttctcctatcttctaagcttattaagaaccacttttagggcctatatgcactctacagtgttgtgcctccaaggactttgctcatgcttcttccctttgcctggaaggtttctttgtcacccagaaggcacttttttttttttttttaaagacaaagtctcactcccagcactctgggaggccgaggcaggtggatcacgaggtcaggagatcgaaaccatcctggctaacacggtgaaaccccatctctactaaaaatacaaaaaattagccaggcgtggtggcaggtgcctgtagtcccagctactcaggaggctgaggcaggagaatggcgtgaacccgggaggcggagcttgcagtgagctgagatcatgccactgcactccagcctgggcgacagagcgagactctgtctcaaaaaaagaaaaagagagagaaaaaaaactgtattttttgtcttaagctaaacaaatacatctgggtgaaactgaataaaataggattgtgggagaataagtaggcatcctactcccttcctcccacccagttgttactggcctgcttctctctctatttctgcttctttcgattttgttttagcctcggggtgagtgggtggagggagtccaaaaacacatctgtactgtagaggagaaattgatagcatagctttatggaacttatctcagggttatgcaatccagaggtcccctgatttcagctctcatcagtgcaggaatcctttttccatcattctttgacaggtcctcatgcaacctctatatgagtatctccagagactaataacttaccaccccctaaactgcctgtgtctttactttgcactactaattatttgaaagcccgttctctcttgagccacagtcatatctttttttctggagtaatgctacaaaaaggattctgcctctttttcacaataacttttcaagtatttcaagagactgttagtcatttttatggattttctcttagctaagtgcactgttttgttttgtttttttttaagttttttatgtggcatgatccatccagctcattcccattctggagtactctagcttttaacgtgtgcctgaaatgacacataatagccctgtgtgactaaatacaaatttcttaggaactgttccttcctgtgacttgaaacattaattactgtgttttggttaggagtataagctttggtatcagacagatgagggtgtgaattctgacttttttcccctgtaattcatatctctgagtctaaattccgtaatgttaccatataggattattgcaagaattaggtgaagtaatgtacatttaaacatgaaccgttggctgggtgcggtggctcacgactgtaatcctggcactttgggaggccgaggcggggaatcatgaggtcaggagatcaaaccatcctggctaacatggtgaaactccatctctactaaaaatacaaaaaattagccaggcgtggtagcaggtgcctgtagtcccagctactcgggaggttgaggcaggagaatggcgtgaacccaggaggcagagcttgcagtgagccgagatcacaccactgcactccaacctgggcaacagagtgagactccgtctcaaaaaaataaaaaatgaataaaatatgaagcattgttcctggctcacagtaaaggctcaaagtagaagcacttgttacactgataattatatacctattggcacagcctaaaattgccatacgtttttttgcagctgcttcacattactgttaatattataatcattatgctagtatatttgttgtttatcagcttgtgctactactcaggcttttatgccttctccaattagccatccccacatcttgaaagccagctctgtccttttaaggctgaacttactcagtgtattttccagaaggtttttctccaattcttggatccagaagtattttgttcttacttatggcatttgttacagtggcatttgttcaattttgtacaagatagactatgaaaataggaacagttcacttgagaaatttataaagagatgagggatgatgagattaatgtcttaataaagctcaagaaaaaggaaaagcatgtatagttggactccccattttgtatcagcgtacttatttcaagtgactgaaatgagtaaagaaagaagccttgaagtcagctcacctatgatttttaactatgatattttgtattttaaaaatagatacttggtgcaggtgttattggcagacagaagtaagaggctagggtgaacaggctatgggcgtctggtaaaagaatttttttcccaaaaatgctctgggagtttcattcccaaaagatggatgcaggtaaatctgactctggtcagtacaatcaaggcaaattggtgtttttctaaactgtgaattgggagaggattctacttacaatttgaataataggtctcatctctatacttattctggtacatttaaagaaaaacttaggccctatattggacctacttcagaccttacaatccatatagtaacccataaataagtaaaacctttgtatgttgtgattttttttccctattcaagaatgatacctagaatattatacaattactaatttggggaatgatatcaagaattatgttgtttttggctttggttgtggttttttataactttaaattttgagataattatatattcacaggaagttgcaaagatagtacagcatgtttttcttttaagcacctggaagacaaccatcttctgtccctctgtttcacttatttaccatgcctatttcaaaggaatgttgcaggaaacaattgcaaaatgcttttgcaatcccaaaataaaatatatcaaataattttaaaaggcatttgcaaaaaaaaggtagttctataatattgtagtgctgtatttaactataaggctctacctcttcctataatagaaatagacaaaatctcagacaatcagtataatgtggaacatgagctctagagtcacattgacctgtaatggtatcctgacatcagtaaacagctggtgatcacttaaagagactcagttttcttatttaaatggggataataattctgcctctcatgatatgatgtatataaaccacaacacagcatgggtgtaacagatgatatacataaaacacttaaagcatagtgagaattcaatgttagctattaccaatactattttttcatgtaggtgattagtgtatttctcagattgataataaaagaaggttataacttataaggatttcacattgttaaattaatgtaataactgtagaaaagtatagccatagccaagcttggcaagtacatttagtaaaatataactcatattcctttaacgtagtaaccttagcaataacacaaaaagaaaagaattggtgttttttggattgatggggtatttaataattactttaatgtttttatctaatagatcatctcaggagcattaactccaatatatttttagtgagaaccttatcacagatgaagttgtgaaagaaaatttgatatttattttgtaatgtattttcagaatgttaaggattaacatatatttaatgtggaagcattatgtttgtttaaaagatgtgtctaataagggcctacaaaaatttattgtacatgaagatactcaataaatattgttaaattgagaataaatgactaatttataaacagttaaatattttataatttgtttttaatgttattattaaaatgaacctgtattataagatctcaatatttggtaatttttttgaagtgaaacaaacataagttagccattttacagggaacaattcactggcatttggaacattcacaatattgtacaagcaccatctctatctagttccaaaacattactccaaaggaaaccccatcaccgttaatcgggtgctttccatttctccctccccccattccctggcaaccaccaatatattaatatatactgtttcatttttacctattctggatatttcatattaatctaattatatatgaccttcggtatctggcttcttagcatatttttgatgttcatctatattgtattactaacatatatgagtacttcattcctttctatagttgcataatattctattgctctgtatatagtaccacaatttatttgttcattcatctgttgatggacatttggattgtttctaccttttggctatagtgagttagtgctttaaacatttataagtatttgagtacctgttttcagttctctggggtggtatataccttggagtagaattactgaggtatttggtaattctgtttaacttttttgagaaactgccaaactgtttttcatcatgacttcaccatgttacatcccctccagcaatgtatgagggttacaatttgtcacttcctcactaacatttgttattttcctattcttttctctttttttttttttaagtttttggtttatctgtttttaattatagccatcctagtgtgtatgaagtggtactttgttgtggttttgatttgcatgtcccagtgactaatgatgttgaacatctgttcatgtttgttagtcatttgtatatcttctttgattattgattagagactgttcttttctaaagtctgcatacagtgctgtaaatttccctctcagtcctgccttaactgtgtcccacaaattttgatttgcttattttcattttcattcatgtcaatgtatttttaaaatttcccttgacatttctatttatttgtcttctgttctgtttttttcacttctgttttctctttctgcattcctgtgggttacttatatttttttttagaattgcattttgatttgagtttaatgtctttatatagtctttttcatgcttgttttacatattttattatataaatgtcacctgtcagttcactggtatcattttaccaattcaggtgaagtatagaaaccttacctccacttttgtctttttattctccctcacttacaatgtaattgtcttaaatatttgctctgccttcatttagagccacatcacagaatgccgtaataattttgctttctctgtcaaacttgcttttgaaaactcaagaggaaagggaaagtttattgtatttacacatatttttactctccatttttttgtttgttctttctgatgttttaagatttcttcttttatcttttcctttttgtttatttatagagtttttttagccagtcttttagggtaggtctactggcaataaatgctaattttctttcatgtgagttactttccctttcattcctgaaaattattttctctaggtatacgattattttatttcagcacttgaaaaacattgtgccacttcctattggctccatggttcgtgataagaaatctgctgttaatccagttttctcttgtaggcttcatacaggtgcattcaagactttttttgtcttttgttttcagaagtttgattatgatatgtcttgacatggatatctttgggtttaccttatttggagtttgttcagcttctctatctaaatgtttatgtctctttttaagtgtgtaaagttgtcagccataatttctttgagcacttttcaaccctgctttctttctcctattcttttaagactctgtgacaccaatgttagatcttttgttctagaccacagtttcttgagctcttgtttgtttttgtttctccttttcttggtctgttttcccactgctgttaggttcagtaatttcttttgttttttctttcagttcattaaacttttcttcatctcttccattctgctgttgaacccattcactgagctttttattttagttcgtgtatttccatttggttcttttttgagacaaagtctcgctctgttgcccaggctggagtgcaatggcgtgacttccgctcaccgcagcctctgcttcccaggttcaagtgattctcctgcctcatcctcctgagtagctgagactacaggcatgcaccaccacgcctggctaatttttgtatttttggtagagacaaggtttcactctgttggccaggctggtcttgaactcctgacctcatgatccacccgcctcggcttccctaaatgctgggattacaagcgtgagctaccatgcccggcctggttctttttttgtatcttcattttctctactgagattgtatttgctggggctttccatttttttcgtttggttcaagcatgttcataattgctcattaaagaatttttatcgtggctgctttaagtctttgataaattttaacattcctgttattttggtgttggtcatttcttgattgtctttattcattgagtttgagatcctgctggttcttggtatgatgaataagtattttatagaaacctgagcatttttgtattataagactctgggtctaattataatcttctgtttccttgcttggactccactgatactgcagaggtgccttgttacctgctgtctgagatgaaagtcctgaccctgtacttggccttctctgacatcaccccatcagggatattgggcattgtgagggtggaagtctaggctccctacttgtcctgtacagttggtgggggggccggtttttcctatgaaattggctactgtagagtggttattatctaagctttctatcttgctatgctgttcctttcctggtcctttggctacagagaataggtttttgtagggattcttttgtctgtacctgtttctagattgccagcttctatagctccaagtctggaatgtatgaggcataaataaaacttagggcaactcagcactttattgtccttaggtcccaggggttccagtagtctactgtcttctcttttagagtcttacatttgtttcatgtattgtgtgccagtattttaggtgtactcagaaggggcaatagtgaaacataagtctactccatcttcccttaaagtggaagtcactgttagctcttttttataggatgattcatataaccataacttgtaagttttaatggtaccatatgcatccctgttgactatctggaaaccacacaagaaagcatttgtcagtgttcagaatctctctaccttgcatatagaaatttattttgttagtcccccatggtgattgtgctcagggagactgattcaagctaataatactctttttgagacaggggcttgctctgtcatccaggctggagcgcagtggtgtgaacatggctcactgcagcctcaaactcctgggctcaggcaatctacccacctcagcttcccgagtagctgggactacaggcatgcaccaccacactcagctaatttttaaaaatttttagtagagacaaggtgttgccgtgttgctcaggctggtcttgaactcctcagctcaagtaagtgatcttcctgccttggcttcccaaagtgctgggattacagacatgagctaccgcacctggccaggctaacaatactcttaagaaaatagtgtatacagtcagacagtcaatttacttaattctcagtgattacaaaacattacttccatgaggatcagatggtgtttggctgggcagtcaactcacagtaagtgatgctgaagcaagaatcagttaaatagcctcacaacagctttcttttggtgcatctgtattgctcactattcctcattgtgtattcattttatggggaatgagttacacgtcagagcagttattggagatgcacacagctcaagattcattcctagaaaatgcaaaggatccaatttaattcagacatttaatggcactgagcttttagagcctagcttatctagctctacaataggcatacttgccaggaggatctgactagacaaattgatatgccaaggctcctccacccatagacaattcttgggtagaccctgctggtttcccctttgatttctacttgcctttgatctttacttacgagtaacctattttttctgcatacttaccagtgtcttttgttaggttatcatcaggcctcattgtcctaggagctgttttgtttttaagggtagttaatctagggtcatagacccccttgcctgtggttgggctctaagaggaagccctgaaatgcacaagccaaccttgtaagagagcataattttctcatcatattctcaaaggagtccatgatcccaaaatcattatgagccactaatgtgtagtgttgctctgctctgttatgcatatatagttcagtctcttataaatcaccttagcttgtcattactgaagtgttattattgctgatttctgtgttttcttactatagttaaagatatgaaaatttggtcttttttgttaatattttttgctttggatttattacttatctagttgttatcaatgtatttcttttttattttaacactagaagtttcagtatttgagggcaagacaatttattgctctttctctttgctgtttcttatatccctctcgtcctaaaatgttacccataatatagaactattgcacgttttcagttctcttttcttcagttatcctgcagtctgatacagaatacatccttgtcattttaatgctgtgtagattttagtttaatgtaatgttttatacttaactaatcattttattctgttaataaataaagtctttaagggcctgtcagtatggaaataggtaaatattactgttaccttttaaaagaattgagtttgttgctaatctgacacgtggaaaagcatcaagctcagatatgtgctgccttcatcaggagcctggaaaaactagaattgccatggagctaagtgtccatcttcagttggaaataatagtgccattggtgcctggcctgcctgcaatttcatgactcctacattgcaccccgtgtgatctgtaggctatacatttcatggtgaacctgagatagcttgcatagcagattttctatacatttggatcttgaacaatgtgggagctagggcaccactccccacccctgtgccatcaaatctgtatataacttttgacttcccaacaacttttttaaaaaatttttatcttaaaaaatttttttttattattatactttaagttctggggtacatgtgcagaacatgcaggtttgttacataggtatacctgtgccatggtggtttgctgcacccatcaacccatcatctgcattaggtatttctcttaatgctatccctcccctagcccccatcccccaacaggccccagtgtgtgatgttcccctacctgtgtccatgtgttctcattgttcagctcccacttatgagtgagaacatgtggtgtttggttttctgttcttgttagtttgctgagaatgatggttttcagctttatccatgtccctgcaaaggacatggactcatcctttttatggctgcatagtattccatggtgtatatgtgccacattttctttatccagtctatcattgatggggatttgggttggttccacatctttactattgtaaacagtgccacagtaaaacatacgtgtgcatgtgtctttatagtagaataatttataatcctttgggtatatacccagtaatgggattgctgggtcaaatggtatttctggttctagatccttgaggaatcgccacattgttttccacaatggttgaactaatttacactcccatcaacagtgtaaaagtgttcctatttctccacgtcctctccagcatctcttgtttcctgactttttaatgattgccattctaactggcgtaagatggtatcttgttgtggttttgatttgcatttctctaattaccagtgatgatgagctttttttcatatatttgttggctgcataaatgtcttcttttgagaagtgtctgttcatgtccttcacccactttttgatggggttgtttttttcttgtaaatttgtttaagttctttgtagattctgggtattagccctttgtcagatgggtagattgcaaaaattttctcccattctgtaggttgcctgttcactctgatgatagtttctttggctgtgcagaagctctttagtttaattagatcccatttgtcaattttggcttttgttgccattgcttttggtgttttagtcatgaagtctttgcccatgcctatgtcctgaatggtgttgcctaggttttcttgtagggtttttatggttttaagtcttagtttaagtctctaatccatcttgagttaatttttgtgtaaggtgtaaggaaggggtccagtttcagttctctgtatatggctagccagttttcccaacaccgcttattaaatagggaatcctttccccattgcttgtttttgtcaggtttgtcaaagatcagatggttctagatgtgtggtgttatttctgaggcctctgttctgctccattggtctgtatttatgttttgataccagtaccatgctgttttggtagtgtagccttgtaatatagtttgaagtcggtagcgtgatgcctccagctttgttctttttgtttaggattgtcttggctatgcggggtcttttttggttccatatgaaatttaaggtagttttttccaattctgtgaagaaagtcagtggtagcttgatggggatagcattgaatctataaattaccttgggcagtatggccattttcatgatactgattcttcctatccatgagcatggagtgtttttccatttatttgtgtcctctcttattaccttgagcaaagtttatagttctccttgacgaggtccttcacatcccttgtaagctggattcctaggtattttattctctttgtagcaattgtgaatgggagttcactcatgatttggctctctattattggtgtataggaatgcttgtgatttttgcacattgattttgtatcctgagactttgctgaagttgcttatcagcttaaggagattttgggctgagacgatggggttttctaaatatacaatcatgtcatctgcaaacagagacaatatgacttcctcttttcctaattgaataccctttatttctttctcctgcctgattgccctggccagaacttccaatactatgttgaataggagtggtgagagagggcatctttgtcttgcaccggttgtcaaaggacttcccaacacctttaaacttaactattaatagcttactgttggccagaagcctggccaatcaataaacagttgattaacacatattgtatattgcatgctgtattcttgtaacgctatatactatattcttacaataaagtaaactagagaaaagaaaatgttatttaacatacaagaaatagaaaatatgtattttttatttttttatttaaaatttttttttaagagatgggggtctagctgggttgcccaggcttgtctcaaactcctcggcttaagcaatcctcctccctcaactcctgagtagcagtagctgggactacaggtgcacgccaccaggccaggctctgagaaaatatgttaagttttctatttgttaaggggaaatagattatcacaaacatcttcatcctcatcatcttcacactgagcaggctgaggaggaagaggtgggcctagtcttgctgtctcatggatgccagaggcagaagagataaaggaggtaggaggcaggagaagcaggcacactcagtgtaaattttattgaaaaagaatccacgtattggactcatgcagttcaaatccatgttgttcaagggtgaactgcaatttattactcaaagatgaagaaaacattacgacaaaatgtatcctaagtattttgaatatactgcctacattctaagtgcactgcaaatgtggcataactagttaactttcttcagtgatttaagaaagcctcacaagaggctgcactaactagatgtagagcatctttgctaaaaaaaagaattataactatctaatacttacttagtaaataaagaaaatgaccatattgaaaacactgattgattttaagtattgccacagaagaaagatagtaatttatcatcaataatagttactgctgttcaactgagatgtgatttaatattactaacaaaattgttcttaattttccatacattttttatctttttatgtagttttaggcctaacattatattaataattgtcctatatatttaagcaaagtaaaaacacttgaaaaatagaaaatgcatgtaaatactatttgaatgaggaaagtagtgatgccaatatttctaccttttcataatttaagacatttctaaaattgtatgaaatacacagtttatatgatttaatacatataatgaaccaagaataataattactttttaaaaacatatttgtttcatggccctgccggaggtgtagcaaagttgatgaggtaattttaaaacaattttgcagtttgtctcatgttttttatagataaaatagatacctgcttatgaaataacacaaaaaatctttttttccaagtatttgatttgaagaaaaaactagtgtgagtaaattcagcattgttgattgtaagtgaatctttttttttctttagcgcaaactcctacttgtgtgagtgggtgaatcttttaaaggcaatttcacatatgtctgtgttgctagaggaaacctctcacgcttctgtcagcgcttaaatgccaacaccactgttgtatttcccttagtagaaaaggggagggtgtttggacgtaacattaccataatagttttgaactgtttagaagataatgttcctttaaaattgttgaatataataatgttcaggccaggtacagtggctcacacctacaatcccaacaccttgggaggctgaggagggaggatcacttgagcctgggagttcaagaccagcctgggcaacatggtgaaacgccgtctctacaaaaaatacaaaaattagccagatgtgatcatgtgcacctgtagtcccagctacttgggaggctgatgtgggaggataacctaagcctggggaggtcgaggctgcagtgagccatggtcacaccactgcactccagcctgggtgacagagtgagaccctgtctcaaaaaaataataataatgttcataggttctcaatacaaattagttgaatttaatctaagacaacttccaaatcttgtatggatgcttatcgtatgttaccttgatttgtaggtttatttataaagcactattgatttaaaaaatagtatggtatgtgcttctttaaagtctctcctggctcttttttctttcttattcttagtttattttatggattatcttttcctacttgccttttaaatattggtatcatctaagattctatcctagggtctctgtctgtgctacatactgtatattgtctaggcagctgtctatctgctacttgaacctttattctcaactgtacacctataaacccaattatcttatatctcctggatgacccaggctatccaacagtgtattcaatattaagctcattatgtctttctctctccattttcagttcataccttcccccagaataaaagagtatgtatatttgcatataaatatataacacatacgtatatctctcatatatgtacttctgttttggaaggcccactgctagtaagcagcaggcctggaatttttaattctggttttttgaatgcaaatcctcagctcagagtgtattctatataacatggtgtccatatcttttcaaccaaaatcaaagatgcatgctctgacaatatttgaagtctgcacttgttgctgtaattataccacattgcttttcatcttactttattaagttgtcagcatcataggggacactaataaccacacatacaatgtaaaactgcaattatgataaatatagtgagacatgtagtataagatagatgaatgtatattttttaaaagatagccgggcgtaggggctcatgcctgtaatcccagcactttgggaggccgaggcgggtggatcacgaggtcaggagttcaagaccagcctggccaagatggtgaaaccgtgtctctactaaaaatacaaaaattagctgggtgtggtggcgggtgcctgtaatcccagctactcagtaggctgaggcagagaattgcttgaacccaggaggcagaggttgcagtgagccaagttcgaaccactgtactccagcctgggtgacaaagcgagactctgtctccgaaaaaaaaaaaaaaaaagatgatttgacctagtcagagctatcagatgcttccctgggaagcaattgagttgaaatgtaaaggttgggtggggaaatggaagattgttcaagataggtgagatagcttgcacaaagacttgggggttaagagagtacgtgctatatgtgtaactatccccgtgcaaagtatttgcaatcttgctagagatttcacgctcctcatttccttctttcctctccttttcttgcatccttattcatatatatttataaaagaaaaaatatatatttgaatgtatattagaatgtatagatatttgaatatatatatttgaagctgaagtttgcattaaatagagaatactagaaagcaaaatgtaactgcttttgaaaccacatagcagataggtaattttagaggaaccatgaaatttaagtgaaaagcatagccatgtgctaaacatagtttctaatgcaacaccaaaaagaaaaaggatttatggtagtattgtttctacccttctaagtcatattgtttctactcttgttaagtcatattagcatttataatcactttataatcactgtcctgttacagttttttaatttataatttataatcactttataatcactgtcctgctacatttttataaaccagagaataactaaatcgggtaataaatttcaaaaccttttcttaaattataagtaatttctcttttaagtgcatttttatactgtgaagtttagtattccatgcaatctttgtgtgtttgagaattagttcaggctgtaggaattctattagaatgtaaagtgacttttgaactgcactgaagtactctgtggtctgtgctattctgcatttgttgactctttattcctttttgttcttgatatacatatgtattatccttcataaggaattctgaagctttggtcctcaaaacatttcttcaacagctcttacctagttcttgaataggaagattatgttccaggctgtacagctgttttagaatcaactagatcctcttagaaacccaagcaatttacccatgttttccatatcccttggttctttgcttttgttttttgttttcttttttgtatcttttctaatcatggtccaaagttcagtgttcataacttccttatagtgtccttaaaaacttagttcgtatctgtttttctttccagaaagggctattgcaagacacgaagtccgagaaattgagcagcgacatacaatggatggccctcggcaagatgccactttagatgaggaagaggacatggtgatcatttataacagagttcccaaaacggcaagcacttcatttaccaatatcgcctatgacctgtgtgcaaagaataaataccatgtccttcatatcaacactaccaaaaataatccagtgatgtcattgcaagatcaggtaattaccacttaaggaatgcccaaatattttctaatacttcctcactcaaattttctagctcaaggggataaagtattttaaagggatgtgagtgctgatctcagtggatcataagccttttaggggagagggccagctaacttttgtataattttacttgacagtatttgacacatttccttgcatatagtatgtactcaaatatttgtgaagtaaatgaattaatgaatagcttgaatttttgagaaaactgatgttcctgagcatagtatccttttaaaaatataattttggcatgataccctgcaataaaaattattgtctcaacttatgatggagaaatatttgatggatacttgtattcaattttgtgaccagcccctctttactagatagagatagagatagatacagagagagtttatatatacattgcttataaatgtatatatagtttagttgtggcttcttcaacataatcttaccttttaaattctcacgaagttttagataaacagatgaataaataattttgtgaaatggttttaagaaaagtagaggaaattatcttatgaaataaaatttgctcatctctttaatagtagtagcatacatttctcccacacctggaattttgactgcaattataaataaagttctctctataaatatggaagggcatgggaattccaccccatgagaaggaaagataatgtttgcaaatactacttaggatcaaataccaaattggagtaggcttattagaaagatatttgtgatggtcctgtagttacaatgatatttatctgtttgaaagcagtgaacttgttacagaattgactgtcatctcactatttagcataactataatccttacacttaaacaagagaattacattgagacacaagactaaggttggctttcttgctagagagctgtttgtaaaggctagtagtatatggtatgtcatctgcccatgtaatttttggctctttgcagaatcctggagtactcttttttgtagaaccaaaattccacatctgtcggccaaaccaaataactcttctatgaatgagaagaaacatgagttgtttttagctatgtgtgtcataaaaactattcattatgtaatattgtgtatctcaaggacaagtatcctaaatattctgtttttatacagtgtgtagtaggttttaaatctttttgcattactgcttttcaaaatatgctttggtttaaaaggaatatgtattcatgcttagataataatttcagatttattcagtagtactttttagaaaaataatgttaatttgtttgttcagcattacaaagtcctggtaactgcaagatgtctggcaatgacatcaaccattattttcatgaaatataaatctggaggagctcaccacatatgacatttataggcatcatgtagtagtatattttcccagttgcatttggatgagataaagcttctgtttttcttttaataacttgttggttatgtataggaaaaaaaaaacagcaggagagaagcataaatgctatcttaaaagcaattggattgcataatgaccaacacttaaaaaatgtttgtgtggggcagcgcagaagaatagtcttaatcattagctgacatacttcaaaattatcagctggtagtccaaaacctgatcttaattaagagtaacttacttaacaaatgttctttatataccctatctccagttttgtgatctcttgttctatgtagacgcagttcttcaaacaagttatatttactgcttccccttcttttgtgtgacatgttttcatgtttacttcacttttaatctagtaagcttcatctaaatgtaaactaaaaattgcactgtatttcttaaaaataatttttaaatattccctgaaccccatctgatataacacacttttattttaataatatcatattttgttgtctctgtgtactgttctcagctaccttttttttttttttttttttttttggagacagggttttgctcttgcttcccaggctggagtgcaatggtgcgatctcggctcattgcaacctctgcctcccacgttcaagcaattctgcctcagcctcccaagtagcgaggattataggcatgcgccaccacgcccagctaatttttgtatttttagtagagacagagtctcaccgtgttagtcaggctggtcacaaactcctgacctcaggtgatccgcccacctaggcctcccaaagtgctgggattacaggcgcctggcctctcagctgcttaaataagaattaaatgaactattttgctcttttttcttctctaagaaatagtttctaatcaagtacaacttaaaagatgagatctttcttaaatctgttgtctccagcttccgtgtaaagctcagtttactcataaaaatattttgagatatgttacctgaccatcctctttattccctcaccttccaatcttagttcagtctgcttgatatctgcctttagccccagctttcctagacattttttgtacatactatattaggtattgttctaaactgtttacctgcttaattatttgtctcaaaaattttagaggcaaagcccaaatatttttagtctggtataaaaccactcaatgtataatagttatatatattctgctatccttagaaatagttgtcaactctgcttttgagtttttcatttatttgttgtgtatgtaatatacacaaaggttgtactacattctttggggaaataacaaagaaatagaaagcatggccacatccttgaaggagcttatttaaaatttacttgggaacataaaacataaacacaggggctatgaaaacagttaaaataaaacatcaatttgtggtgatctcactgaaatatttaaccaaaagtgttccctaccaaaatgtttgatttggacctaatcccgagaaaacaaattaatgtagaatattctacagaacaactgacttctaaagtgtcagtatcataacaaccaaaaaagttggagggaggcttctctagactagagagacatggaaaccaaatgtaatgtatggtctgtgatcagatccttgatcaaaaatgatatctttgttcatagacatagtacatgctgaggtaattaggggttaaatatgaatgacaactatttgctttcaaataggtcagaaaaaattgagtatgtatgtgcatacatagagaaaaaagataaaagtgacaaaatgttaataattagtgaatctaggtgaagagtatagagatgttcactgtcctattttttcatcttttctgtagtttagaaatttttttaaataaaaaagttgaaaagttaaaagaaggatattaaaagataaacatttgagaatataaggtatgagaaactaagcaattagaataaggtgtggactcagtcattaaagatacatttttgcgatgggctttacttagttaatagagaggaattggcaagagataggtaatcaatcaactcttctagttgaaaaatggagtttgctttgctgtcatgtgtttagccataccatatatgtgattagccacatcttttatgatttttcaaaaaaagaattcttttttgctctcatatgtttaggtctatgattatatataaccccttttgttaaaacattggaaatacctagaatttgtattctctgaagaacaacatgaatttttttctttttgaaattcactctcaagccaactttaggttatctgcgttagagcccacagttcaccaggagttgcagatacttttcagagcagcactttagatgaattttctccacctataatgtgtatgctaatcactggttaaaatgcagattcagattcagaaggaccaagatggagcccagttttcaatttttaaacaactcccactggatgccaaaattaatgccgctggtctttaaactgcagtttgagtaacaaagatacagatgatgattctcagtagggatatgggaagatgaatactttagtcttcccaggatggtagggtacttatctttaaattgttattcctacctcccctacaaaatccacatttcttacatagaccaagaggccctttttaatctagcccttgtgtgcaccaacttcttacccactagccacactggccttgtgtttcattgaatacgccaagcctttcccattttaaggcctccgcacttatcctttcctcttagaatgcacttctcctggcttcttccagagttggcttcatgttatccatttaaggtttaatgacatcctcttagaaaaaccatgcctggccatcctacatattaattacctcttctaagttactgtgtactgtatcactcttgttgtgtcttctctggtactaatcagcttactaacttatcttatatattggtttgtttactgcctgtcttttcctctattataagatctttaaggataggaaccttgtctgtcttgttcactactatatcccttatgtttagaatagtgcctgagacatagtagaaactatacattttttgttaaataaatgatgaatgaatgaacaaatggaccaacatagattttgatagcggtagatgataataattactggcagagtgagcacctctgattgacagcagtatgatctattcttatctctcaggtggattgggaaccagccccctgccctacactcctaaaacaggttgaacagcacagctctgaacttcagtgaagatatgttcaattactgcaaacttttcttatatttttatccaaccactactttgttttcctgtgagtgtagaaaactttctccctggcttagtctcataaaagtacccacagccatacaagaaatgtttaagtaaatgcatgagtgggagtttggtagatagtaattactcaagttaatagtagcattcattcaacagatagtaattacagagttggaatttggccagaatgttcaggatgacattcctgctcttttagatagtgaaaacaaatgcttttgttatcacagataatcataatattgaggttgatctattaagaatataggtcaagacactactgttagtgagaagggtgcttcttagctttttcctgtaacatcagtttaggtctgattcaactaacaaaaaaccccaacaccattacctatattgtttgtgtttttccttaaggtctcttcttattacttgctagcctgacttgagtcatcaaatccaacaaaaatcacggtttacactctgcttcaggctagctgcgtttcatgtactatatctgactactacatctgaaacattcttcttggtagcatatttcagtcagagtatgaaaattttctatgactaaagtcactgtagtggccttatttcttctccccaagccagagttttcagtgtcttcagtctccttaacttcaattgatactattaagttttgctccttttttggcctatcactttacctttcatttgtgccaagtatagtcagtaagaatccataaagtgaactgagtagaagtttgcttacctaatctcagtgtcctcttcttactcctctgtattttcaaaccttgtctcaaggtcttaggcagcatgcccaagagaaataccagaagaaaacaaactgaaagacaaagcaagtggtgcagggaggtgagaaggcagatcatgatagagcagaactgggactagactgatgagagagaaaagatgaaggtgaaagagtagagaccaggaaagttctggagaactaaggataaatattaaactgtaaaaggagaagtggccgaattaatactttaaaaataaaacttttaaaagtactgtttttcaaagggagttactcatattatttccttggagaacagttttgaagaggagataaagataatatggaatttcagcagtatgtaaatgatactttttttttttttgagacacagccttgctcggtcgcccaggctggaccaggctggagtgcagtggtgcgatctaggctcactgcaacctccacctcccgggtccaagcgattctcctgtctcagcctcccgtgtagctaggattacaggcatgagccaccacgcctggctaattttttgtattttagtagggacggggttttaccatgttgccttggctggtctcaaacccctgagctcaggaagtccacccgcctcggctttccaaagtgctaggattataggcgtgagccactgcacctggccaacactttcaaatgctcagactgttttctagattagtgtgaaccatgttagccatactgacatcatttatttgcttcacacttttttcttcgtcataaagagaaggtaaacctcagttcagcatcttttgattcattgtaaattttaaatcggccacagctatgttaatgaaactttaacatattgccttagttaaatgctgatgagatgaaagaaaaatacgtatgccagatatattacatgtctagcctttagtatgcttttagtttgagcttagaaagagattctgtgtgttttgaggactttaacaatagtagaggccaggcacagtggctcaggcctgtgagcactttgggattctgggaggctgaggtgggaggatcacttgagcccaggagtttaagaacagccctggtaacaactctacaaaaaaaaaaaaaaattttttttttctttaaatcttggcttggcatggtggtgtactcctgcagtgctggctacttgggaggctgaggtgggaggaccacttgagcccaggagttagaggttacagtgagttatgatcatgccactgtgctgtccggcatgagtgacagaatgagattctgtctcaagaaagaaaaaacaaatagattctagagaattttaaagcaataataatcacctgaatttacctcagatagcatggatttaggaagtaaaattcaaaatcctacatagatatttagatgtagtctcttggtttcaaccaggagtactcagcaatcccagtggttacccaagataataaaaagacaagggaacaaacgtcaagggttattgttaaaatggttgtccggtaaagagagtagtgatcagggtgaatgggaagttgatatgacaataaagttgatgaatgaattcataaggaaataaacaattgagagagttatatcaacagagctttgagatgttggagagatggagtagttttgaacgactggatctgagggattgccttagtagtggatagaagttgagattttcagtgtccaatttgttaaagcagaatcatgatatgggggaggaagacagagcaatatggccaaatagaagccttcagcaattgtcccccagcaggaacatcaaattgaaaaactatccacacaaaaaagcacccccataagaaccaaaaatcaggtgagcaatcatagtacctagttttaacatattaaggaaagaggcactgaagaggataggaaacacagtcttatatctcctataccacccctcctccattccccctggtagctgccacatggcgcagaaagagaatctgcaccctgggtagggggagagcacagtgattgcgggactttgcgtttgaatatggtgctgccctgtcacatcagaaagtaacaaggggcagagctcagctggtgcccacagaaggaacgtttagacagctctagccagaggttaatcttccatctcagcagttggtatttcagttccagcagcccctgccaccatgggctaaagtgcttgggggtcctaaataatgataaaggagtcaattcagcaagagaatataaaatttttaaacatacgtctgtccaacactggagcatccagatatataaagcaaatattactagagctaaagagatagatagaccccaatacaataatagctagagacttgaagacccttctttcagcactggacagaacacccagacagaaaaaccacaaagaaatatcatacttaatctgcagcttacaccaaatggacctaatagatatttacagaacatttcatgcagtgactgcagaatacacattcttctcctcagcatatgggtcattgtcaaggatagaccatatgttaagtcacaaaacaagtctttaaaagttcaaaaaaaaattgaaattatatcaaatatcttctctgatcacagtggaataaaactagaaaccaatagcaagacacatggaaattaaacaacgtgctcctgagtgaccagtgggtcaataaattaagaaggaaatttaacaatttcttgaaagaaatgaaaatggaaatacagccttccaaaatgtatgggatacagcaaaatctgtgctaacaggaaagtttattgcaatcagtgcctatatcaaaaaagtagacaaacttcaaataaacaacctagtgttgcatcttaaagagctagaaaagcaagagcaaaccaaatccaaaatgaatagaagaaataatgatgatcagaacagaaataaatgaaattgaaacaaaaaaatacaaaaagatgagtaatctcagcattttgggaggccgaggcgggcagatcacgaggtcaagagatcgagaccgtcctggccaacatggtgaaaccccgtctctacttaaaaatacaaaaattatctgggtgctctagtcccagctactcaggaggctgaggcaggagaatcacttgaacctggaaggcggaggttgcagtgagctgagatcgtgtcactacattccagcctggcgacagcaagactccgtctcaaaaaaaaaaaaaagaaaaaaaagaaaaaaaaagaaggtttttttgaagagataaacaaaatcaagaaacttttagcccaggataaaaagggagaccttacaactaataccacagaaattcaaaggatcattagaggctactatgagcaactatatgccaataaattggaaaacccagaagaaatgagaagtcttgcagtagtgtagacattatccagcttcctgggcttttttcactttgtgttgaagggtacacattggatgagatatcattcatcctcaggagagggtttagtttaatattgaccatccttaggaagctttgttggaggaaaaagaatacttgaatttgtacctgactcttacttctgcccacgtctttcactacagtatactccaagcttgtactatatgatcttccctgctgtttagtttatataacactgttttttcagacctcaatgtagcatctttcatttccctcctacatcaccatgtccacattaaatctcagcttctggaaaacagaggtgagttgctaaatatatcttaagctcactttagccaccatcttcaatgccttattctctttgccttcttttttcctctcatttttggctgaaatactagaactgattttcatagaaccaaaggtttataggaaataatctaccattaagtggcagttataaagacttttcatattcagcatgtaaagtatgttaaagatgcaggctctggattatttaattttatattttgtttctgtttcatttgcaatttggtattttcattctgtttgatgccttagttgaagaattggaaagaacatgaaaacctcaaatcacatttatttggctctttcagtttcagtggggaaaaaaattgaaaatatctgctaaaatgacattgtatactttctaatgcaaactaatttttatctgcaattcatttttcagattttaatttaaggatgtatatgtgtattgagaggccaagtaaggcatataaccatttccattctaaaagcttcataatttctcttagtatgtgagttattaatgcttcccctaaagataaattatcccagaactcttccatttttctctagttcacattctctgacatatagctatatctgcactgtttcccctccctcacctaccaataggcctttaacaggaggcagctatcatcattcattgatattattgagtgtagtgtagtatgaagtgttccagaatatctccatgtgactacccctattctatgatgtaagtgaaagattgataagttgtcagaattatgcaattgacagttctgtgtttgagaggctgaagtcatagcttgcagatggtttcggtgcggtacaggttggtggacctcactgcccccactttctgcactctatctaggttctaaaagagattcttaaccacttgctatttatcatgcagagatttgcttatcaaaaatgtataccattttccattgagaaattgtatatcactgctttgcagctagtgatacttaggtttatcaaattctatattaaccagttttagacatattaaaatatacttatataatttttcatattaatttttgtgtacgttaattccaataagttaaatatttagaaattttaaatattttgacctgtattacatctctaattttattaatctttttatcaacaagcttgtgatatctgctcttaactcttaaatatcttctgataaccatcacctttttaaaaatcattttggttttaaatattactttttatttgttgagtcattaataaaaataaacttttatgaacagcaagcctctgagaagaaaacatttgatatgctggaatgttcctgtattgcctgctttagcatgtgtgttggcagggtgtagatacatacacccccacaacgaccctcctcccaccctatgtaaatgtactcactctacagcattgtaaaggatttcattgtgccattttgttttcagaatcatctttcactcttttgtgagtataatgatagtagctgtctctatgatgaattttaatagttacagattacagtatactttccttagtccaaacctgtgtttcaagctctgtaaaagtggttttaggtttttaaattcctatcttggaaatattttgctatcatcaaatttcattttctttaaattgtatataatgaatgtgttctccctttttaggtgcgctttgtaaagaatataacttcctggaaagagatgaaaccaggattttatcatggacacgtttcttacttggattttgcaaagtaagttacactgaaatgacacgctaaagaatgctttgtactctagtaacctaaaaaggaataaattcattaaattgttatgattttctaataaaagaatgtactgtcttgcctttgccagttttagatctgtaatttaaatataccttcttagtgttttactgccctctagtgttcataaattggcaattcttatattaattacatattagttattactctttaaagtttattattattgtgtgtatatgccttgtacaaccagaatgacactacttcaggagagctcaagttataacctagaggccagattatgacttaccacatcattgagaaagcaaaaaagctctcactaagttattggtgctccagtgtgtctgcttctcacccaagacatactgaagtgtacactttcccttgggctaccttattttagctttaaaattatgatgtattacgaggcttttttaaaaaaaattcatgatttcctctctcaccccccctctccttctccctctctccctctctccttctctcttgctctctctccctccctgtcactcactcactcactcactcactcactcactcctggactcaggtgatcctcctgcctcagcctcccaaagtgctgggattataggcatgagccactgtgcccggcctctgtcatattaatagttctctcaagaagggttcagaaaactatatgcctactcacagtattcaagtactatgtggctttctgtacagtctgtgccacattattaatcagaaaattaattaaacttaatattccaaacataacagtcttatggatacatttgaacttttttggtagtacacatagtaccattgtagtaaacctcaaatccaaatgttttccctaagattctgcattaacttcaaaaacactaaaaaaattttttttattatttagcttagacatgtttattcagtttttaaattagctattatgatttcagagtaacacaccttgatatattggtcaactttaaaaggcattttttataaaatttaaaataaaagtgatatcccactctcagttttacttaattttgaaaagaaaaagtagaatgaagtattactgattcaaactgataatcttaactttttgggaaatcatgtaattaaaaaagaatcacccaaatattacatacataaagtgatatgttcctatttctagttcctctcatagtactcaagatctttcaatcaaattgtagctctaaagttagatgtatgtttttctataaataattcatactgcaatattgaaaatattttataggcagctttaaaataaactaattatttttttctttgcataggcattgaaccaatttcataagcttcgttcatgtgcatattttccctcagggctgcattatccttgaattgaatgtttgttaccctttcacctaaatgatttattctttccacacacagcttggtttctaatagtctaggttttcattattaaaattataaattgagtgcttttgcttttggcaaagtcttatacttagaacaaagctctgatatatgctgaggttcttgtagttgaaaaaataaggctttttgaagagattaatctcatttattaaatgctgacatgaatttttaagcgtttgaatattttcatagtgagtcttatgttatttgaagggaaaagtattgtgaaaatttttcatagatttttccaagattttaaatacctaaacaaaatcagcctaggtgaaatgtattttgatgtatctatgtaatcaagaactgttgtagatgtaactagtatcctcaaatatcttttagcttaatagccatatgctccataaatggggaaggaaaaggaaagaaacatcgccttaccaattttttagattacagtcgttcctggggtatgtccagggtattggttctcggactgcctgagtatataaaaatcgcatactcaagtccctccgttggccctgtgaaacccacgaatttgaaagtcaccccttgtacacgggtttcacatctctcaagtactgtatctgtgtgtggttgaaaaaaatctatgtatgcatgggcctgcacagttcagactcgtgttgttcaagggtcaattgtgctttactcttcaaaacaatattcttgactggcatagtactttgtggagtccagtaaaatacttgctttcaggagaaagtggtgaatttggcaaaatacttatttaacacatagtttttttaaacttaccttatcagagacattaaaacgaatgtaagccccaagaaacctaggaaataagatagagaaataaaaaatgaacgctcctttctagtttagcccgaccacgaagaaatacacattatatttgcaagcttgtctactcaagccatgttttgattacatacatttgttttttactgaactttagaataataacaaaaatatcttttttacatttttgcattcctatcccatcttgctcctttttgtctgaatcttattctttgatttttttaaagtatatttcctagttcttcttcctttccatttttccctttaatgttaggttatgttttgttttctttttaattggtgaatgatacaattttaagataatgtagatataaattattataaatttgaaaattttccagtttaaaattgtatataggttggacattttcaaaatgtcatagtatgcaggaaatataaagttgagtaagttgcagttcttgaccttaatgagttcactgaaatctttttttctgtaattaccagttcatgaagttttattataaacagtaaaaatattaaatattcctccccttttaaatgtgcactatttattttttaatagcatctattagcccattttgattttcttcaaactttagaaaattaaaatgttagaagtctctttcaaaaacacttcttcagcaataaacattttcatttataatgaataatagctaaaagaacacttttaatgctgtactttctgtcagactctgctaagttttttatgatctagctacctcagtgtcacatgtcagcatctgtcttgagaggtatttgaaaattatttttgatataacagttttattcaggcacgtatcaggtatgtacctttgtagttgtccctagaaatgagaatgagttttcattgctgccattttggttcctccatattgccgctagtatcattttcagaacaagtgaggtgaatcagtaaagaagcagctatgtcacgacaagaaacaactaaatgcttcattaggtctgaaattctaaacagtaatcaagtgacaacattttaggcctaaatagaattagttaatatatagagtcatgtgagattgtcctttctacctaatacttctctgctaaaccagttgacgtttgccccattttctacaacttttaacaaatatgtcacaacattgtagatactttagaaaattattttaatcattccagacaatatgtgggagttgcgtttttattaaccttgtactactagctctttctacagcattgatcctgtagactgctaagaagcaatctctgaagtctgtctctaaagtcagacagatctgccattaaatccacttagactccttgctagctgtgtgatctcacccacattgtttcagatctttgagcttcagtgtcctgtttttaatttgagaataattaaagtaattacttcatggggtggtggtgaggattaaatgtgataatgtagatggagcacttagttctgtgcctcacgcagagcagtatggtgattctttttaaaattctgtcttctttcagttaccatattgtcttaactggtgttttcttcttctccttgtctgaatctctgctggtccttatttccaactcttaattgggcattgtataagactcttagcctccattattctcttttggaaggtttacacatttttgtctgtcatgacacccaaacaagaaactttcaagtaatcttggacaacttttttttatcaccacctatatcttatcagtcatcaagtcttttgagtgtcttctttcatttaacatgatgcttttgacattcatctaatttgatgcacatatcagtagttagttccttgctaagtagtacttcatgtatgggtgtacttcgattgatccattcaccagtttctggatattgaggttgtttatggcttttggtgattatgaataaagctgtcaaaacatttgcatacaggttttgtgcggacttatgtcttaacttctcttggataaaaacctcaaagtgggatggctggattgtatggtaactcaataagaaactgccaaactgttttcccaagtgattgtatcattttgccaccaaaccaacagtgttttaagagttccagctgttgtgtatcctcactagcatttgaaattgttagacttgctctttattacaaaatgtgagccattctaataggtgcacagttgatgaatgcccctttttaagacataaattactttaaaaatatttatttacactatcatcagtgagaccaacaaataccaacaggtcattcacttttttggatacaggacagtgggaccttgccactaggattagaaagtttctatgaagctttaggtctgagagagtccagaataactatgtacaatgtctccagcaagattgttgcctaagtagagaagttaaatttagtatgaagcagaaagatttcaaaacataatgattcccaaaggccattcagccctctttcaggttcatcacctccttttttgactttttccagccagttgacaaggttccttacaaatgttctgagtgtgcagttgatcttttaaccattattgttgttcatttgcatattgatactgttcacttgataggctattgatagaatgtaattgtaaaaaaatgagcctagtttatgttcttgctttgtcacacttcgtatgctgacatggcaagaatgaaattcctaaaatatctttttaccaacctgctgctcagattatatcttttcgtttctgattttcatctgcagattcctaccaaatatgctcttcttttcccaggaagatcgtgttctaacaggtcaacagtagtttattttctgctagtagaaatgggtttttattcttctacctgagctttgttgagaaatagctgaaatgattgaccagagttaaaggtgaggtctgaccacagacttcctatataaactagctcctatagaaactagctggttggcaaaagagtaaaaccagcaaacctcgttagctcttgttttctaactggctgagctgtgtggtccagttgctatttttaatcatgcccattatctgttataatcccttgcctccagcccttcgtgtctatataactgttccctaagttacatatcatagttcatatccattttcaaaatgagttcacagattatatctcattaaaatcatacttcctaataaatgccacccaaagccattccacacatagatagtcattttcctggacagcaaaaagagttttgtaaaatgccatattcccttttactgctgcctggtaattgctgtctgctccacatgtcagggactaggggaaaggaggaaacattggtaggagatgttcttctgcgaggagattattctcaaaggaatggctcaggatggagcagtggctaataatggagaggatagagaggattcccaggaatctcagtcttaagaatggaatcactaacccattgtcctgtaatctctccttgtagtttcctattaaaaacctctcagctctgtgagctaagggagcagcaatatattgctgttgcctccttactttcttactactcagtgtactctctggcaggaaggcttttgttagtggctaattcacaacggtctcctcaacctaattctattaatattcagcacctgtgtgttgggcacagtgctgagcattagtgataaagccatgaacaagagagaaatggtccctgccccggtggaacttctactctaataccgaatgtgacagtgctatgtatttgcaacagtactgtccttcttttaaaaaaaactgtgaaagaaaattttactgcactattggtactatgcctaccctcaggtgacttataatgctgttggggagaaagacttacaggagaaacactagtaggataagctaagagttaagttgcttgatagctcttaggtgcaggatgtgtcaaatgaaagcacatagaactgtatgctagagtcatcaggaagagaggtcacaagattttgttgtagcccctctgtttattccaaaacagcagccaatgaccttttaatatgagttgtgtcatggtaattctctttttaaatctttcagtggcctccctcctgactctgtataaagtaatgcttgtaacagtatagaagacccacacagtctgcactcactccacctcacccccacctctcttatcttccatggtattccctttttgattctacaggcagcttgatctccttgctgttcctcaaaacacctggcacttagctgcctcaaggacctcttagttggaaatcccatctttccagaacactttctcacagatgtttgcatggtaccttcctcattacataagactagtgatgtcttcccaaaaaacacaattttgaattgtattctccctcacctccctagcactccttattccctttcactgaattatttttctcctttgcactttttaccatctgttatatatgcttatttgtttattgcctatctgtcccaagtagaatgttagctctagaaggacaagaaatttagtctttttgttcattgctgtattcctagtacctagaatagtattatatctggcaatattgggttcatacaaaaagtatttttgaaggaattaatgtagaaaaaagaaaaatgagagcggcactcaaggaagacagaataagcaaagatatataaagagaaatagaataagtattgatatgggaggagataaaagaggccaacctaactataacagataaatggtttcttgtttgaggagagttaaagaaaaagttagatcaataaggtggtacctaagacataaggtaaaagaatcctaagacaaccagcaaaggagtttgggtttcatatcgataaatcagtagagttatttcagattcctaagaagagtgatttaacaaatgatgtttaggaacatcctttgagaattggtatggaagatagattgaaagggagagaaactgaatgttagaaaactatattcttgcagtaatctaagcaagcactgagaaaaagggaagtggtaaagagaaagaatgatgaagacaggtcacatctgcgagaaagcttacaaaacaaatcaaaatgactttgaaattttattaaatgaagaataatggaaaagtaagaatcaagatagctgtaacattttaagactgggacaagggtgtataataaaacagggagccagttgtacagttctagggtttgcaagggttgctaaagtaaaattcttcagtgttccatcaactctttatcattccctaaggaaataatgctgaaaacctagtgtctttcacctctatcttgtctttaaaatcagcaacagaaggtagattgacatgttcacacttgtgttcactaatgctgtatccattgatggtgttcaaaaaacactatcaaatctggctagtgtgatgagccagaagtgagaaatcattgctacatagttaatgcagatttgaaactttctgtagcagcagatgatttattcaggaatgtaataaagcaatttttaaaataagtttgcttaaaaattataaatattaaattctttcctagtaatatgtgggtactaatttgagaggggattttctacttggacttaaagtataatgaaggcatagaaataaaatgttttatataattcttgctggtaaagtttaaaattatttttcattcatttttatctcctttatcttcagacatagtttttaaattcatatttcttgtttactttattctgacatgaataatcatgaaatagttcccaatcgccacatacacatacacaaattatttaaattaattcatgttcttttttccttataggaccagtacttcagacttaaacatgtaatttcagggcactcctaaacagattgaaaatgttgatttcacctttgaaattttgttgtatttcagatttggtgtgaagaagaaaccaatttacattaatgtcataagggatcctattgagaggctagtttcttattattactttctgagatttggagatgattatagaccagggttacggagacgaaaacaaggagacaaaaaggtaatattttagttttaagatttttataaagataattgtttatgaactgcagtgagcaatgtgcttttaaaatttgttgttaattataaatttattacttgcttattgtggaaattttgaagagaacccaaaatataaagaagcaaaatgaagaaaattatatagctgatatattgtaatatacatttttttgtgatttttaaaaatatttcttttccagggcggaatcgtgttttctttatggttctattaacaattttctgtgcgattattgtaattattcactaatatgatatatttttgtgtattttttggttctctaagtattgatggcagtttatatttgtgatcatcagtttaaggacactattttgctgaagcagctatttttttctggcaagaagagaataatggctcaacaaagttcttaacaggctcaaatttgggttgtcttccatttcactgcattttctagagtatcaccagagttacatttctaagaaatcaaactgatttgtcacttctctggtggaaaacctttactgggacttcatgctcatggattaagacataggagacacaactggacacgatctcagacctagctctcctgtctgattttcctttaggtgtccagtgcttcggccacatgaaatgtcaccatcctctgaacttattgcttaagttattaatgcttcatacttttttacacatgtattattccctatattgagaatgcctttcctttactctggaaaactctttatccacctttaagatctagctcaaacatgaccacttccgtaaagtcttttctgatgcctccaggcagtgagtcatatctctttcagggctcccagagcacttcattcaaagctctcttttaagcatttattttgtgatatttggattaccagtttacctactgtcttttccaaaatgtggtgaatttcctgaagcatatatttaattcatcttcgtttcctcagaatttagcatcatacctaggttacccgtaagtgcttaacaaatggttgaatgtgtgaattctgcacattttaaacctaaactattacacagtagtgatgccagatacttggtatgttaatgataattaacatccaacagtatttttttctaagttagttataccctctgtgtcacatgatgggggcagtggttttttgttttgttttcctttttaatgatttctagaaattgctgtttctttagtctcaaagctttaggcagaagatactgatccaaacacagataactaaccaaatctgttttcttaaataatgctatctctcagcattatttaatcttctagaaatatttattgtggagattctgcgaagttttataaaatctattagtataactcttatgacttactactttagaatttattgatatttatttctaaattcacttgtgcgctttctttttattttttattttagccctacttacactaactcttgactcagtaaatgttagtatctgtctccctcctttgaccaaagtaatattagcgtcggtgttggaaaggaaaagattgcagtcatgtaggcccctatatccatcatttatcattgtcagccctggatagcatggttttgtggttcctagcctgtgtagtttgggggattgggtaataataactaataataattattaacagtaataatagctcacatttactgtgcaccataccaagcagtgttttaagttattttatatgtattttttcaggtagcttgcgcaacaattttatggggtagttgctgttattgtcctcattttacagaaaaggaaactgtggggcacagaaaggctaagtattttgcacggtgtcattcagctagtaaatggtagagctggaatttaaaaccaagcactctaattccagagcccatacatcttacatcctttgaaaagaagagaagaaatgcaacatgtcactcgacatttttctgtgaaacgtgatccaaagttgcatattcaatattcacaaaaaaatccaggcagcattttaacatcatctccctttcatgtttgaaagttttaggtagataggccatcctggagctttatctgttcttcaccctgactataataaggcctggggttttgtttttttattttttaacttcgttataaaatacacattaatatgcctgcttatctagatgtagtgttgataacatcagcaaaatactattgcattgtcttacttcttatgaggacagggctgtctgtaaataattgatttataaaaataagaaattactttgttttgtgctagacagaatgtaccttttcagtcttgaaacatattggtgattagacatttttagtaatttggcttgtttcttatgatacacatgttggtaacctaatgctgataccctaatgagttaagtggtgtttattgcaaataactccttaatatctttaactagcaggagttttcattaaactcatctgtaaagttgataagactgcatacatataacatttctaaagctggacaggttttagaaagatattgggtgttaaagggtggccatgattatgttggaaataccttgtaatggcgcttattctcaaaaatgtgtagatagctttatttctataaaattctagattctttgcacctcaagtgatattttgaggtgtattaaacagtattcagttcagcacttatggcaactattatgttttaaactgacgtactctagtaatctgaactgctccgtggttacacttcaaacacattttagatatatgtgcacctgcacctaggatagctttcacttgatcttgtaaagaatggaaggcttttgatttgggagatttcaaatttgcatattttagaactagagttttatttaatttaacctttgcccagtacctgggaaaatagggatattaagtaatccaaagatgagcattgaataactatatcaatcaaatcagtggttctcaaactttttgatataggaactccttttatactcttaaaaattattaaggattgcccaaagagcttttgttttgttttgttttgttttgggttatatctattgatatttaccaatatcagtaaatttgccatttactgaaaaaattttaaaatattaaaacaatagtaaagccatcatgttaacataaattatattttaatgcacataactatttctcctccgacaaaaaaatgaaaagagtggcatcggtttacatttttgcaaatctttttatcatctggcttactatagacagccggttttctttttttttttttttcattttctgtttttttgttttgttttgttttgaaccctgagaagctagacagctgattttcatatttgctcctgaattcaatttgttcgaaatgttcttttggttgaattgaggaaatccagcttcacacagatatataattagaaaagagaggattttaatagcttttcaaaaaattgcggctattctttaataaacactaaaacttgacaagtggtagtttcaaaagttagttgcaatgtagaatctgaaaccatagcagtgaactttttatactttgctacattaaaatctattgatatgttttacactttgaatgaatcttttaaccaagcataattttgaaacatcatacattggtcatttggaacatactggttcactgagttatgtggacttttcaaatgttaacatattttgttatacagcgttaaaaactcatatacattaatatcaccactaatctcatcagaaaagtctttaagtattgggagactgtcaagcttatggtggcagatacaagttttccaaaattttattttttgcttgaaagcttaatttttatcattggcctatcacaggatttctcaacctcaacattattgttgttttgggccagataattctttgttgtggggggcttcttatacattgtaggatgtttaccagcatctcttacttctacctggtagcatcccccatacctcagctgtgagaacgagaattgccttcaaacattgccaaatatcacctgagggtcagaatagcttccagctgagaacccgtgggatatcaacactgtcagtttttccttcaagtgacaggcataatttattcattttgagaaaatatcaccaaatactcaaattcaaatagctatagtttgggatatggtaggtgcatggatatataaggttttatttcttatttcttcttatgagctacaaaatctggcacaaatgataataaaaccactttttagaaaatggcctaggctggcaaatctaagaccatctagaaaaattcagaaataatatcaaatgcctcatgaaaatattttatttcctctgtcttcacctccactagagctatgcctttaatacccatgtaaatccccaaggtgcagtcttttcagtagtcatttacaaatattaatagtgcaagtggtttatatagcactattctatatgctctggaggacacaaatgctactgcttgatccacaaatgctacttcaggaagttttcactgtagttggaaagacagaacataacacataacacatttaaaaagcatatgaaacaagttatgtagataaagatatagacagacagatcaacctatcctaagattctaaaccagatcctaagagctgcctgttacaaggcagtatgtgattttgttttgttttgttttgtttttgttttttttgagacggagtcttgctctgtcgccaggctggagtgcagtgtctccatctcggctcactgcagcttccacctcctgggttcaagcgattctcccgcctcagcctcctgagtagctgggactacaggcgcgtgctaccacgcccagctaatttttctatttttaggagagatggggtttcaccatgttaactaggacggtctcgatttcttgacctcgcgatctgcccgcctcggcctcccaaagtgctgggattaaaggtgtgagccaccgtgcccaactgtgattaatttacatgactccaaaaaaaataagagtgtctcatcccacctactctggcccatttatttaataatttaccacattagatatttgataggtgagacttggatttatggcttacccgtgctgctttgtctttgttctagacctttgatgaatgtgtagcagaaggtggctcagactgtgctccagagaagctctggcttcaaatcccgttcttctgtggccatagctccgaatgctggtaggggagataaagttggctcagattgattatcatccttattatctctgtaatctgtgtttcatttcacaagggctagatatagggaaatcggtgaaagactagactaaaaataacatgtaattcagtaatatctagttttgcagttacttttaaatgcatttaaaagattcctcatgtagagtgatatcctaatatccttgcattgttttctgagatgccggtttttagtatttcttatttttggtgttatgttttgctgtattccagcagagctcttagagactgggggtgggggtgggtgtcataaatcttattttgtccaaagcttactgttttagctattcatgttaaattaagaaaaggcttagtgggttaaaattcacctggttttactgttaaactgattttgactttaagagaagccaaggttatggctgtggtttagtttgctagtaaatatcaagtggaaaataaagatactttaataagaactgtatttcctcagaatgtgttgagttttcagtttttaaaaataattttacgtatttatttgttctattcaatcattttaataggagaagtaggagaaaaaaggaacatattcaaagtttcttccataaaccataatgagaaatacaaggaatgtcttcattatttgagataatattattagattgctgtggagtttaaggtcctactcattagattacatcaaagcctcataatagtataagaattggaagcctataaagaatgccttctcaatttttaaccatttctttagaacagggattggcaaactacaggttgtatcctgcagacccagtttggcctttcacctgttttattttttatttttttgagacagaatctcactctatcacacaagctggagtgcaggggcacaatcttggctcactgcaacctccgcctcctgggttcacaattcttctgtctcagcctcccgaatagctgggactacaggtgcctgcactaccctggctaatttttgtatttttagtagagatggggtttcaccatgttggccaggctggtctcgaactcctgacctcaagggatccacctgcctcggcctcccaaagtgctgggattacaggcatgagccaccgtgcccagctgtgtcacctgttttataaataaagttttattgaaacacagccacatacatttttttacttattgcttgtggctgttttcacactgcagcagcagagttgagtaattgtaacctaaaccatgtgtattagctgttcttgcattactgtaaagtactacctgagactgggtaatttataaagaaaagaggtttaattggctcactgttctgcaggatgtacaagcatggcaccaacaagggcctcaggaagcttacactcgtggcagaaggtgacgcaggaacaggcatatcacatggtgggagcaagaaagtgggcagtaggggtgggggtatggttcccagactttcaaacaaccagatcttacgtgaactgagcgagagctcagttatcaccaaggggatggcactaaaccattcatgacagatctgctcccatgagccaatcacctcccaccaggccctacctccagcattgggaatcacatttcaacatgagatttggagggaacaaacatccaaaccatattattctgcccctggctcaccaaatctcatgtctttcttatatttcaaaatatattcatcccttcacagtagtcccaaagtcttattccagcattaactcaaaagtcccaagtccaaaatctcatctggagatgagttccttctacctatgagcctgtgagataaaaaacaagttatttattcccagtaacaatggtggtataggcattggataaacatttcccttccaaaagggagaaattggccaaaagaaaggcgcagtaggccccacacaagtctaaaacccagcagggcagtcattaaatcttaaagctccaacataatccttgacttcatctcctgcatcctggtgcaaggggtgggctcccaaggccttgagcagccctgcccccatggctttgcagggtacagcccacatggctgctctcatgggttggaattgagtgtacctgtagtttttccaggcaaagcgtgcaagccgatggtgagccaaccattctggggtctggagggcataatcaccttcccacagctccactaggcagttccctgtttgagtctttgtgtggggtgagggctgcagtgcaacccagttctgaaatctaggtggaatctgcaatctaggtggaatgcaagctccttcatgcttgcattctgagcatctgcagacttaacaccacctggaaaccaccaatgtttacagtttatgctcccccagagtggtggcccaagctatacctggactcctttgagctgaggctggaactggagtggccgggatgtggggagcaatgtcccaaggcttctcagggcagcaggaccctgggcctgcccccttaaatcattcttccccccaaggcttctgggcctgtgatgggaggggcagcctggaagatctctgaaatgcctttgaggcctttttcccattgtcttggatattagcagttggctcccttttagtcatgctaacctccttaataagtgattgctccacagtgttattaaattccttccctattccctgccctattccctggaaaataggctttccagtgggagtggttgctcatgcctgtaattccagcactttggaagaccaaagtgggaggatcacttgagcccagaaatttgagactagcctgggcaacctcatctctacaaaacataaagttagccaggtgtggtggcatatgcccatagtcccagctacttgggaggctaaggtaggaagaacacatgagtccaggaggttaaggctgcagtgagccaagatccagcctgggtaacagagcaagaccctgtctttaaaacaaaaaacaacaaaaagagggggctttccttctctaccacatggccaggctgtgaattttccaaatgtttatgctctgcctccctttaaaatgtaagttccaactttaagtcattcctttgctcttgcatttgattgtagcctcttagacacagccaggccacatcttaaatgctttgctgcttagaaatttattctgccagatgtcctaagtcatcacttttgtgtgtgtgtgtgtgttttttgtttttttttttttttttttttttttttttgaggcagtctcactctgtcagccaggctggagtgcagtggcacgatctcggttcactgcaacctccgcctcccgggctcaggcaattctcctgcctcagcctcctgagtagctgggattacaggcgtgtgccaccatgcccagctaatttttgtatttttagtaaagatggggtttcgctatgttggccaggctggtctcgaactccagacctcaggtaatccgcctgtctcggcctcccaaagtgctgggattacaggtgtgagccaccgcacccgaccagtcatcactctaagttcaaacttccatagatctctagaacttggacaccacatagccaagttctttgctaaggcataacacaggtgacctttactccagttctcagtaacttcttcatttccctctgagacctcatcagcctggacttctgtccatatttctgtcagcatttttatcacaatcattaaaccagtctcgacttaagaaatttcaaagtttccctcttcttcctgtcttcttctgagcccttcaaattcttccaaccgctgcccattacccagttccaaagccactttcccattttcaggtatctttatagcaacacccaactccttagtaccaattttctctattaggccattcttacattactgtgaaggaatacctgagatggtaatttataatgaaaaaaggtttacttggctcatggttctgcaggctgtgcaagcatggcaccaacatctgtttggcttatgatgcaggcctcaggaagcttacaatcatggcagaaagtgaagtgcgagcaggcacatcatatggcaagagtgggagaaagagagtgaagggggaggacccagtcgtttattattattattattattatttttgagacaaagttttgctcttgtcgcccaggctggagtgcaatggtgtgatctcggctcaccgcaaacctccacctcccaggttcaagcaattctcctgcctcagcctcctgagtagctgggaatataggcatgcaccaccatgcccagctgattttgtatttttagtagagatggggtttctccatgttggtcgggctggtcttgaactcccaacctgaggtgacccgcccaccttggcctcccaaagtgctgggattacaggtgtgagccaccgcaccaggcccccagtcttttaaataactagatctctaatgaactaactgagccaagaactcagtcatcaccaaggggatggtgctaaaccattcacaagggacctgctcccatgatccagttacctcccaccaagcccagcctccaacactgggaatcacatttcagaatgagagttagagggaacaaatatccaaaccatatcactatgtagtctgcaaaacctaaaatatttatcctctggccttttatataaaaagtttgccaatccctgccttagaacaataaagacttgctctattgggcatttttgagaagttaattgtatttctttagtatgtttcatagattcacagaactgggagggttcttagaaaccaattaatcactgttcccctccccctctttgttttttttaatagtttgagaaaacaaaattgagaaaggtgaagccaccagctcaagatcatactgctacttaaatgcagagctagaatttggattaaggaatatttgtgctaaaaagaacccaaaagtatagtttattttggatcaaatctctgttaatagcattagctgacaatgtaaattaaaataaaaataaaagattcttagcagagccattatctattttctgttcctcagaaatttcagaaaacacttagctcacaaaaacccgaaactcacacaataagcagtaaacacaaattgtttacactttgctagagagctcttaacagaatttagagtagtttaaaaaagttaaaacacacactaaatcatatgggaggggtgtatgtttcttatatccatatacatttttaaagtgcccttaaactaaattgctcatgttaagagtcctctggtaaactctgaattagcactcatagttgagcagaaactggagatggaagcaaatgaaattggaaacaggtgtgcctcccacaggatggtaataaagaggcattgaggctttggatatacatgtgtttatctattttctctgtaatatatggtgtcaaaggcaccagaaacactcagcagatttcacaaccaggttttaattccttttctttggtttcaggaatgtgggaagcaggtgggctatggatcaagccaagtataacctaattaatgaatattttctggtgggagttactgaagaacttgaagattttatcatgttattggaggcagcattgccccggtttttcaggggtgctactgaactctatcgcacaggtatataaaggaagggtttctttttaaagctttctttggtttggttttttggtttgcaacttgtaaatatgtgatttgaagtttcttcagtgaaacacaacagatagctccagaaaggcaggtatcttgtcggtttctgctcactattttcaattgagtaactgtgaattaggtgaaaattagaaggcactgtagaaatagtggaatgatacaaagtacagaaccagccatagaaatgtatggtattcaataatgccagatatcaaacattaggcctgtgtataagtcctgcctactaccattttgaagtagaggtgtgataggggaactgaagtatgcctaagccatgttttagcagcctcagccgtattatcatgtgtctgaaagtgataagctaattgtgtttttgttttgtttcgttttttgctattgcttgataagatgcagtcataggaactcttctccttgaggatgcatatgccctagcttctaacacataattttagagaatacagattatgagaaaatagaatacagtttgacaataggtattttatcaaaaataaactagtctcagagcaccaagcacttgagaatatagtgtgtgaggtgacagcctacactttactgtgtgccaatccttacattgactatttgacatttcattaagtctttactaggttaaggattaacattctaaaggactgaatcatggctctagtttgatcaaggctccgtttttacctgaattatataagacaattatgttacctgttcttaatgtgtcatattaaccacctcttcaaataaagaggcattgatcttttgtgtgttctccaagaattatttacctttcctttttttccccctttgtaagtaggaaagaaatctcatcttaggaaaaccacagagaagaaactccccactaaacaaaccattgcaaaactacagcaatctgatatttggaaaatggagaatgagttctatgaatttgcactagagcagttccaattcatcagagcccatgccgttcgagaaaaagatggagacctctacatcctcgcacaaaactttttctatgaaaagatttaccctaagtcgaactgagtataaggtgtgactattggattcttgaactaaaatttgaccctgtcttcacctttgttctcagctccacagtctggattgctgacagtaggtgtatatgacaatttgtattgagccaaattaggaaacagacagtaacgtcaaggaagtagatactggctggcattgtcagtgttctaagtttcaggcatttttatttttcctggctaaacgttggtgaaagttataacctcctgcctgggagaaaatatacatcacctaaaatgaacttatggcaggtctaatcaaaaggctaaatacaatttcagaaaaggttctgatactcttgtttttgataaagcattttttcaactaaccatgaattaagatgagtccatttgcctcttctgccttcactgagggtttgggttatacacctctactgaattgtgttaataactgtttggcagtgtgtactttgtttttgtgagtcatgtctcatgaaatttattggaatgtttaatcatatttgctaagaaatgtttctgctgtagttggatttgcccatatttatgtaggtggttttaattttttaaatggtgattagtgttaaaaatcaatttaaatcatgactaatatggtaaaaagataaagcatcaaagcagtatttctcattcctgcctcctcaatatctaatactgggaagatacttcaaagaatattgagattgtctgaagttttagttaagattttcacacattaatatcaaaaaagtaagtttagtatttgtttctccatgggttatttgtaaagctgtaaactgagatatcggtgactccgtattatgactccattagtgagctgtggtatgggtaggattttcctacttcttctgtacttttacctgtagactatttttactaaggtgctttataatgtgttttaaagcattgcatttacaaaacaaggaaaatgctgtaaatattgcatattttatgtatttggaccaaaaggttacaagtaattagacaaaagtggttttgcaccaattttatgtcaagtaaaaccatcagacctactgttcttgtatttctcatttaactttactgttaagacatcactgaaatgaacttcagtaagctttcaattttgatacacagttcattattcataacttgaggcagtaattacagtggaatgagtactggacaaggagtcaaaaaacttgatttcaggtcctagctctagcacttacagctgtgtgatcttgggcaagtcacttaacctctctttgcctcaatttcctcatcttgaaatgaggataataatacctgctgtacctacctcacagggctgttgtgaggattaaatgagatggcatgtgaaagcactttgaaaattgtaaagcgctatgtaaatgtaaggtattatagaaacatctttaacatatagtttcataccattcattttttaacaaagaaagggaaaagtctgcttgtaagctggttgaaaaagttaatcttgatataaatttgtgtttgataaatatcctctcagtgttttatcttccatgtttcaacaactattgaaatatgaaatgcctgtgaactcttaaagcttcatgagcagctgcttgagttcaggaagttcactgttagaaataggctttgttagctgactagggtcagggaaacttttctcttcaaatttgaaagctgtttctgttttcattttacattattattcagaaatggtagctattctatacctatggtttaagtaaatatttctgaataaggcttcaccatactgtaagcattttaggtagattgccttaaaggttatgggagggcatgagggaacacttcttatgagaaaacatttataaacaaaagaaacatttataaactaaagaaaaactaaaagaatgacagaacaatcatcttagcaccctttcctcacaataatataaaaatattaaaagaacataggcaggctttttttaaatttggcttttttctttccttttttcaaattgacttttataggtatttcctgaaagtgtatacaaattatttcctcgcccaaaataaagcaccacttcaaggtgtggtttgacattacatgctaatgaacaaacccagtatgcaagttattcttgcaccacatgctcaaatcttcttgaggtgcattaactcttttaggtaactagagcagtacttggtgaactagatcaggaggtcagtaaactttctgtggaagggccagagagtaaatattttaggctttgcagcccatacggtctctgtcacagctagtcaaccctgccattttaccacaaaagcagcaatagacattatgtaaacaaatgagcacagttatgttccaataaaactttatttacaaaaacagatgacatcccagatgcagaccatgggcaaccaaccattgcactggccaaatcattatttatggagaaatcctctttgtgtctctactctagatgcctaaaagagtttatatacttctaaaagctcctaacttatatccaaagaattgctttctgattcgtgtagtctctcccacagattcataaacttttatgacttatattgtttccaggtgggcatggtttatttcccagtttaacagttcagaataggggcatttattttatcatattttagggtgggttaggagtatcctttctggagactgagaaaggggtgtatttaattccatcaggtccagtacagtactaggagtcataatactttataatcaattaaataaatagaaccactgagacaataatgtatttttttaaagtggcaaatgtggttttcttttttcagcctttgcgctttttcagtattttgaccatagggagataatttttttataatacaaaagtaaccacttggaattttaaagataatgttatgtgtgtatgtgaaatatatatacatatatatatatatgtttatttcctaaaagaagaaaagatacctttctgttcaacttgtatcaactcctcttttctaattgctgtgaaatggcaactgttgataaattattgtgattgttttaaaatctaatgggaagtaaaatatattttgattttacccagcttaatctgtaaagtagcacttaaatatatctgatagcaacacttaagatattgcatggggattactttcctatcatccatatgcatttgtgcaacttcaaacatattgggtgcttctgaattcctgatgattggatttaagctattgaaaattggataatttaaacttaatgatttttataattttctgatcttaaaatttggttaatgcctataatctgttgctttttctcaatatgtgtcctattggaaattcctcaaatcgttggtgccatcagtgatttacaaacaatattttgatattgcagatgacttgcttactgtatttgcattgttagaaaacagtttgtagacaatgattcttttttaataaaatcaaataattctaaaagtgctagagaatttaactaaaagctggttcccaaatgcatagctggcattttaatttaaattcaaatctacatagagaacatctgtgtaaatcatctaactggatttttccattggtcattcccaaacacacctatggtcctagaatccttaagagaagcaccctgtaaccttttatgtggtttgcctttaagaggcccaggtgcttctcctttatgatttgagttggcctcttcataaattagtgctgtttactttcagaggaagcagagaagttgctgttatgtttttgcatccgtttaccctatgcaaagttgctgtatgatgccaactaaactactctttaggcagccttctgaggagaaaagcaaccctgtttcaaatccactgccaattcagctcctctggagtggagctttctgatttcttggagcaggaattttagagattgaaatgaatgatcatttagtcagatttatcctgtaatttcatgcagctttgtggcctttgcagtactatttataaaatggaccctgatggtgatgaactctttagaacgcattactgttaagcctgtgttgagacattgatgctgtctatctcattttttagacagtttttgtagctttctattgagagtcaggtatgtgagcatctctgaagcagtgttgaatgtaattttcggaaacatggattgtgtattttgacttttattttataaatacacagctcaacagtgccttttttttccctcatagtcctgttggaagatgctcactactttctctcttctctctccctgccctcccccactccattcagttgattcatttatgcaaattctgtttccaacttgaaaccattttgtcacatctgttggagagataatcactccttttccttaacattctgccagctttctgatgttgaagtgtttcagttgactacctgatgcaaaagctataaaataaacagtgggaaggggaaaaattggtgtcctgttttaatattttcttttgtagccttgacactgatggacattttccaagctgactcagtgttcagtgtcaacttaactctcagatagtgttgccatcaagaaagcatgcaacatcattggtttctaatgattttatggcttgtgacaatattttatctggactgacatgcctctgctgcttttgctttgtacttcattgctggtaataaaatttcagatggaaaacttacaaaatatatacttaattagaagaaaaaaatagagaaagggctattagaattaaaaaaatttgaaagtaacttaatctaacatttatggcacagtttggacatatccataattttttttgggaacacacatttctgattttttttttcccccttaaagaagaaagtctcaattccattgattttcaattcttagccactggctcattgctttgagcaatgcttgattgattctatttatattatatgatattgggttgataaaataccagttcaatgatgagttttcttaacagaatttggtttgtacttgcagtggctgaacaaagagcatggcttgagaatcaaagggatctgcatttagcaatgtgatgtcagtaaatggacataacaggattgttgtaaaggttgggcatgatgtatgcaaagtactggccagggtagactaataactgatggcatttatatgctgtgctggaatattgttaccaagctgatgtgccgttctcaccctgcagaatactggttttgtcatttcataaatgatatttttataaatatttttgaatgactgtactttttactgattatcttaataccgcctcacttatgtacctgtagcataaatattcctggttctgattcttgctgttctttccacatacaaatcactcatttgtacagattaaaggggggaaacgctgactgttctaaagaagataggacttgcttattccagaaatgactgagttcatatcttagtatatttgaacagtaaggactgctaaatagtacacacataaaattcaggatcacaggaatgaaatgatttgcactctttgaacagaaaggacagcagcagtgtaaggaataggctctcaagctaaaaactgagaacatgaaaacctctgaggacctgactgcagttgtcaagaaaagtagagataaggttggggagaagcagacagatctcagggccagaaacgccaacatttggtgacaggtgggatataatcaataaatggggaatgaaggcattaacttgggtttgtaacacaatgcatctgtgcaaattttcagcaccccttgcttttgcctcaattaggcaatgatgattacttcctgtgtcaaagcttataaaacagactagtgttttcccaaagaacataggatcacaaagaaagaattcactgtctccctatcagatgtttggcttccttgcctcttttgctcttccagattttgtgacctgggttagagtttagaaagaaccccctagaaacttttctgatgttctctggtttgatgatgaaggcgtctaataaaacacatcaactctaagcctctacctctacttctctaaacctgaagtttagaaatgaaagtcatgcctggaaatgtttcacatcattagcactgacagcgtttacagggaaatagagaaaacgtatatggattaattttcttttagatcaagggtgtgggcaactagatttctagagccttcagcctgtctatcggtgatgctggaaaaggaagaggatgagctgtaagtgcagtaactgacccctgtctaggttttcttgctaaatacgccctccatgaaacagacaacataagtattttgaactgtaagaatgttaagaaatttctgtccctgagcagcagatcgaagagtgattattctgggattctagaatcagttcattcttttctttctccctctccctccgctctcctttctttccagtttaaaatcactcagtctcttagtagaaatttaacatcaaagaactgtcaaacttgctaatttgtgattttttaagcatgtgccgccttaaactatcaaagctttaacctgtatctaattaaatgttaaaatctggcaaagagtagacctacagtccccaagtgatctggtttctgaactttgttttgctttcacaaatgtgagccaatttgccctaaatctgggtatttcatgtagcatcttgagagatgtatttaaagtgcctgtggcaataacatttcatttgtacccattttgatgattctgggtgccctcttgataaggcagccaggttgtgctgtaaaaaaaaacaatgtagaggtttcagtcttaggtgtttgaaactgttggatctctcaaaattgattagctgaaatataccttttctgcgtaactgaattcaccagtaattccatttgaagcgggcagagcctttctgaaaatggatgatcagaaatgagtgacattttattcaaccaagagttaccagagacatattttttttcctttaaaagtaatttaaaattcgccagaggattactaattaggtctcttggcatagcatggttatctgatcagactgtcatgcccataaacagtaaaaatgcagcatgttgatccattcatgtctgtttttaaaggaggctgtggactttaaactcctctctcgcaggcttgctctttgtttcatgtgggggctctttgaataacaccttagatgagaacaatgtttaagaaataggccagttatattttgcttttctatttctaccatgctaatggctctctacttgatcgtttaatcactgatccaaatccagatggaattagatgctccttcctgctgtagtcctgcagtcagacagtctgtaatgtttgatacggatcttctgagtggacaagatgagattagattagtctctctgggagccagccctattcattttctaagaaagttatactggaggcctgaggactgccaagagcaaagtggaaacagagcccagccttttcctcttatcaagatccacagtagttccacattaagtagtggagatttgaataatattggatcagaatccaggaaggaggtccttgccacccacgattgaaatgtgaacttcatgtgttacaactttattaccttttcttattttaatatatgacaaagactgaaatctctggcatggagtcagtggcaaattttacttttgtgggtttttttttctacatttagtatttattgagcccccactgtttgccaggcactgcactacaggctctctctgcaccatgagcttaacctttcagtaatcctcatattcaatcctttacaactgtttagaactttataatttacaaggcgctttcatttcacatttatcctctcattagattctcacgtggaagggtagataccattatcctcgttttacagttgaaactgacacagctaggaggtggaagatgggctccccagccctcaagattcctagtccatcaaaccctgatgcccttcctgatatgtgcctgtctctcaaagtcagcaagggctgtaatacagattaaacaattgcagtggttcttaggctataatcccatctctggaccaatagtgtcagcatcccctaggaacttgttgaaaggcagattcttaggccctagccttctgagtaggacctagcactatgtttattaataagctttcaggtggttctgaccaagactaaagttaagaaccactggtctagagcaccagtttacagatgagacgactgaagctctagttgagcttaacctagctggttaagtaacctaaggcttctcataacaaaagttgtgaactaggatgtgaacccaggtcagtctggctccaacaccatctgttttctacattggactgcgttataaactatagtgtatcttatatatttcattattggtaaattcctctctgaaatatcgttttgggggaccacagagcaggtcaataagaagaaaaaagtcccaatgtgctcttctggagtaaggcaaacaatgccaccccttctaatgagtttctgttttctgtgtgaggtgaatgtgggggctaaacctcagcgtggctactagtgtgctcaggaaattcagggacagagccgagaatccaaaatggctacccaaactaagtgcatttcatctggactttctggtcccagtgttctttggtcatacttaatagtttactgtgatggatttaatggcaagagggctccttgccctggcttggcaatatctgtggagccatgggttgacgtagtgtgggaatacttgtggctacttggaaatccctgttgctgtcatcattggcagtgcttcccagccgagattcttagtctgtggtcacgtgtgaactcttccagtcatgcagcttaaacagaagtgcccacttgtttctcacaaattatatctgcatttttttttctcctagaagcaagagcccagaccaagggttagtcgatagctcaagggacttccagggaaatcagaactgatcttcgtgcatagcaatgcttataggcttccttccacacacactgagagatcagcagggcagtggactgagccttcgggtgcaatgcatttcctcaacacattctttttgaaagaggaagattgttgcccatgtatagtgtacttcttatgtgccggcactgtaccaagtgctatgcatttgttaacactcatttcatcccccctttttttttaagagaaagaggatctcactctgtcacccatgctggagtgcagtggcacaaccatggctcactgcagcctcgaactcatgggctcaagactcagcctcccaaagtgctaagattacacgcttgagcccccatggctggcctcatttcatcctcttaatcctctgaggaaggtactactagcagccccattttacagatgagaatgaattagaagttcagatgctttcttacagtcacacagctagaaagtggtggagcaggattcaaatccaagtctagctacaaattttctgctcttaaccatcctgttgcataggctctgacagctgtgacaggcagtagtggggggttgttttgaaagtcttgccataggctggatgcagtggctcacacccgtaatcccagcactttgggaggcccaggtggggggatcacctgagatcaggagttcgagaccagtctggccaacatggtgaaacctgaggtcaggagttcgagaccagcctggccaacatggtgaaaccctgtctctactaaaaatacaaaaattagccaggtgtggtggtgtgcgcctgtaatcccagctactcaggaggctgaggcaggataattgcttgaacccaggagatggaggctgttgtgagccgagatcacgccactgcactccaacatgggtgacagagtgagactccgtctaaaaaaaaagtcttgccatgtcttttctgcctcttttacacagccccacagggcttggcaacaggaaaagcatgacctagggctatggcagtcacccatgtgggctatagctatggctgcaactcagtgcggcctccaacgacgaggactgggagtttggaggggcaaatttaggccattttgttttcttgaaatgcttcctcctagtccctaaattcagtcccaggtcaataaatggcagttagttattctcggtggtcgtggtgatgtctaaagactgacaggattcccagattcaatgttgggaaaatcaccttgagtccacttttcaatgtgctggggagtgagtacaggccaagttcaagtcatcagttcccagcggttcagccagcgtgtcttgtgaattctcccagggctctctggttttagcagggtctccatgtgcaaaccttgcctttgcacaagagccaccatggcaggaggttgaccaagctgttctggggaggtgaaaggtgctgagaagttgatgcttcctcctaagtgctgtatggagcaggcttggcccagatccaacatgggcacccagcaaagactggttgtctcctggtgtccctgcagccctcccagccatcccctcacttcccactgtggcatgctgcttacagctctctccctccacatgcctgagggcctttctgcaaagaggggttcagagatatccatgaccagccagtctaaccttttcagggtgggagggcagagcagaagttttacagtggatacgaggcctgaagccaaaggagtaaaacctctgcctcatgggagtccaggcatgcttaggcaggaggggtggcaggtgggtaggacagcctcttgactccagaaatctcacttcataagtggcacctgctctgagctctccagatatccctgaatttggttttaccctctgttcttgcctcttcctgtctccctcctcctgctcagtccctcaccacaacattccttttgtgtttagggagatttcctagcacctccctggctaacagatcagatccatctgagtcacactgagcctcccatttagtaacttaggactctggagtccgggtggcctaggcgtcatgccaaactcactactgctaatagtaatgctattataatggcttttatacttaaatctcctttcttccaggagccccaaggtctttaacaaatgcaagaattacactactctccaaaaaatagaaactgaaggaaaatacattccttattccaagtctactccttcatggccttacatagttgctttgaaggatggatctttaaagattcataagctttggtgggtgagtggggtggacaaaggagataggctttcttattgcctgaggccccaccagtttcaccatcttatctttcgttggttttgcagctcaaagaccttgaaactacatctggatgagtctaataaactggtatcttagaagaagagataaggttcaatacgaagatgtttggctctcatacccccagaggttatgggcccaacagatgctcactgagctcagcttgtcattgcgtggtttaggacagacaacaaggaaccttgaaggatggagtcagcttaaaaggcaagcattaggtttggctacacacccctatccttagcacctgtgaagatctcagagtgcaaagagaaatacagatcatggcccactcctctatgcctggcactgctgggtgcagaggaagggaagaagcaccaggggtgggcttggccaggacgtgccctcctttcaagggtccagccaccttgtttaatgtaagggaaagagaattcatcttgatgccaagcaacatagcttcccgttctgactgcaccttttctcacctggcattccctcaatgtccaccaggttgctttctttctgttggaggagaaaatgctatctaactttaagtattaagatctgatctcctgattcaaactcattcttcacactgatgccagaaagaaagtttctgtcttccagagagaaagttcatgttgcttcttccctcagaaagtctcagtggcttcccacccactgtgggaagaggtgcggctcctttaaggtagcattcaagaccttctatgctaggtccctaacttccctttcagccttgtttatcaccacagctctctggtagcctggaccaaccaggtcacttatgcctgctttcatacctttctccctgttcttctcccagttctctatggaaatctttctcaccgttcaagacctagctcaaacagcatctctctgggacagtttctttgatcctgaaagtcagaatttactgtttgtcactacactcacaaagcccattgcttgttcctatgttcaataatagtgacatgggaagcacatgctttttgaataagacagacgtgaatttaagtcctggctcgctcacctgtcatgtgccttttggaaaatcactaatctctaagtttccttgttctaccaaaagtaaaaccaaagccaacttcaccttatgtgttgtaagaattgaatgaggtcatagctctaaaatccttgggagaagaacattgtgggtgagctgaaggcgtcagcgttccctaacattttgttcttggtattgtccacctgcacttcttccccttaggtggcaaactccaggtgagggccttttctggctcttgatgttggccccatccaactccaacaccatgtcttgtatagggacactcactaaacatttacaacattgaaagcacttaatttctcagttcctcagtttctctatctggacagtagtgaaaaagaatagcaaaaaagaacattttgggctctgaagaaaaactccccatatgcccctcccaggacggagcctattgttaattggaaaataaatagttctcagctgagcatgtctttgcctttcatggggccccctgcgatgctgtttgggagacagttacagctactttgaggataataatgactgccccaaactcctgtggaagaatgttgggaagataaatgagataatccacctgacagctctttgagctcttatgaaaaagatacccttgaaatgtaggatacaggtgtgccttgctttggtaggtgaattttggagattttataaaaatctgaacctacaaaacagacaaattaaggggtgaaaattagcatcgcaaacagcctcttggtttgacagaaagattcacagcagggtccctttaaatagccagctcccctggtgcatctaaaatatgactcaatctataaagaatttgatttacatataaccagtcaggaacacttctactacagaggaggaagcacatatgttttttataataaaaatcgataactctggggttttaaaaatataaaatatttctttcttctcatcatctttaatcctgcagttaacacttccactgctaggaagtcgcctaaaaaacaactgcatgttctgcagaggccgggccctcacgagcacagctccaggagtgtgcaggtagaaaatggctgttcagctgatgcccatcacatctaaatgcaacttgctgttcctaattgggctaaagctttttttttttttttgagacagagtcatgctctgtcaccaggctggagtgcagtggaatgatctcagcttactgcaacttctgcctcccgggttcaagcgattcttctgcctcagcctcccaagtagctgggactacaggcgcgtgccaccacgcccagctaatttttgtatttttaacagagatggggtttcaccatattggccaggatggtctcgatttcttgacctcatgatctgcccacctcagcctcccaaagtgctgggtttataggtgtaagccaccgtgcctggcccatttattttttttaatttttttgaggtggagtctcactgtgtcacccaggctagagtgcagtggcgcaagctcagctcattgcaacctccaccaactgggttcaagcgattctcctgcctcagcctcccaagtaactgggattacaggtacgtgccaccaagcccagctaatgtttttgtatttttttagtagagacggggttttgccatgttggccagcctggtcttgaactcctgacctcaggtgatccacctgccttggcctcccaaagtgctggtattacaggcatgggccactgcgccctgccggctaaagcattaacttaatgtaagattgaaagcaagtggtagaccgctgacatctgaaaaagtaaagcccagccttatttagaagcgggacgatatttggcagatgcaggagcttctagaaatgagtgagctcattgttcaactttcctctttgggagtctctcaggggtgtgtgtgtgtgtgtgtgtgtgtgtgtgtgtgtgtgtacatgcatgtatgcataacagccagtgcttggaacaatctcccaaagatgtccacattcctaattcccagaaccttcacatatgctatgttacatggcaaggggaaattaaggttgcagatggaattaagtttgctaatcacctgactttaaaacaggaagattttcctagattatccaggtgggcctggattatctagtgtaatcacaaaggtccttaaaagatggaagaggaagaaaaatcagtgtcaagtgatgccatgtgaaaaagactggcctgttcagtactggctttgaagatggaagtgacaccagcctagtgagacccatttggacttctgatctcaagaactgtaaggttatacattcgttttgctgtgaggcactaaatttctggtaatttgttatagcagccatagaaaacaaatctggtagtagggaggtgggtggtagcaggggttattgcagcttcactgcatatttcatgctgaggaggcccgtgtaaaatctctgattgtttttgtaaacatggatgcaaattcatattcaattgctacaggccccatgtgtctagaaccacattctaaccaacaggcgagatgcaggggaaaacagaaatattgtgggctggcccttgaatcatcctgtgtgccacacaggagaagacgtagaatttcctctaatgacaatgactgctttcttctggttaacttcccacttgtaggttaccccacaaagccaatggcacaagtatgaacaattccaagttcctcccttcctcaaaattactgtgtctctaggcccctcctctggcttcagcagctccctctccatgcagagccctggttctagccgaccaaccatcttggagctcctctatgcctcccagcccttcccttagtccctccagagcaagaggatgtggtaagctggctggcctgcctgagcatatcctagaaaacggtttgtgttggaggagcaatggaacactgctctgcctttgacagcctcctgacccctgagggttcaacacacttgtctccctcacctgcccctggtgggttgccctcttgccacttccattgatgacccctttgcaccttcaactgaagtctgcacccactcccacctcctctcacagcctcagctcatccctgatgactcagatcaagtttccttagggtgaaatgaagtggggtgaagctttgtctgcttcttagagttcagggaatacccaaaacaatctaacagtcacaccacctgaccaactttgtgaccttatccacatgaggagaaggcaagaatctcaacagctgaagtgtgccagaaacattatgttttgttttagtgaatccgttacaagtccccatttggcttgctgattggcaatttcagttactgctggatagtctttctctcgctgggggttgtgtctccattgtaggtggcttattactatcacaacagcctgtgtgtgtgtgtgtccatgcatgcacagaggggccctctgacccaggttgtccatccacaccagcctcccaggtctgtatcaccccatcccacccttgatcactgatacccacaggtttgtggctgccctctctcaccccccactgcaaggtctgtgcagatttgactctttcttaactactcctgtgcccccttttgagggcctgtagggaattctgctatgcctctgccccataccccacacaactactctagggctgtgggaattctatggggctgtcacaggcctctcgatctgggcacacccggaatcactttctactctgctgctcctgtccatgctgggcacccaggaaacagacagtggtgtctttgctcttccatcccacaacctcttttgttgttctcttattcccctccatcctccagggggcagcagtaatgcagctctttctcagggaccccactgaggagtcctctctttccttctgctctcctttggagactccatctcatcttgggtggcaagtggggtggatacaccaaatcttttatatcttagtcagacttcacttttgaatctcaaaactcaaacagttggatcttgggtgctttagttccactgggacaacttttctttgacctagaaatgccacatgtgggagggtcacaacacaacagtgacactagtgaatatatctctgcgttgtccccatatgcggcaaatgggtgcaagatgctgcctgccactcactgtgcaaagactacccacaccaggaaaaagcagagcctgtgctccatgaatctgcaatcacgggcatctaagcttagaatatcccactctgttgcaagtgaaaacatgtaggtgtatctctttggcccaactcaaaaggtagatgttttctcccttttaatacagtcacttggcagtttcagctttctatgaacattcttctggaaaagaacctcagctcgttgtgtagttaaatttattcagcatataaatctcttaaaatccatgcccttaaatgtttatggtcatgtgggatattatcagtgtcagagatgggcagggttgaaggaatttggggtcagactactttcttttaatcttctccaaacattttaggtttggcaaaacttgaattgcattttgccaagcccctgtgcctgtaatttgtaaacccctgtgtattttcagttaaatgtagtccatatgtttctgattgatttacacttaactcatctaaacgttgttttgttagtgttatttgatgtccaaagggcctcagagcctgtttacatctgtctaagctgctcgttttcctccctgagactcaggaagatctgttttgccaagagtaaactaagtcgaatactgcaccgcccctccccgcctccaccccctaggattggatcagacttgggtagaatctgacaaagagctgaggaagttgcactgggctttgaagttgaccaaacactctaccctacatttcaccaagaggaatcagagcgcaaagcctcccccttggggactgtgaccaataacacgaatacagagaccagatcctaggccaggccaacttcccagcctggcccttttccttatggcactgacatttggctgcaactagccaccaccgacctcaataggcccgtcccttacaactctttcatccaagcttcagtgggaagggtggaatagattttatacagtgaatgaaagcaatcaggcctcttgctagatctgtggtaacaatctcataaagcaagagtgtggttttaaaatgaaacaaaagaaatccttagctagtgccccatttcactgaaccttaattttagatagcttgcatttgccttgcaaatgagtccacaaattaccaagccacaagcatttaaaaccatcctgcccactgccagaaggagtatgcctggcagaaccaatgaggctggccccctactgctccaccacagtaaaagtgagttataggagtgatgcttgaactgagatggcatcccacaattttggaaacatggtaactagggatggggacaaactgcaactttatgattcaacattgagggaaatggcgctttgttttgaaagaagcgcagtggctcacgcctgtaatcccaccactttgagaggcccaggagggcagatcatgaggtcaggagatggagaccatcctggccaacatggtgaaaccccgtctctactaaaaatacaaaaattagctgggtgtggtggcgcatacctgtaatcctagctactgtcggggctgaggcaggagaatcacttgaaccagggagtaggaggttgccatgagccgagatcattccactgcactccagcctggcaaaagagccagactccgtctcaaaaaaaaaaataaaataaaataaagcagcactttaatgtgtatttggtcgtgttcaagcaaactctatttggaatggaggtatttgagacaaagaggagccaagtaactctgtaaaatactatgacgggttgtcttctctatatgcagagttgcatctcagagataattatttcattggacttggaggaccctctgggagatttctctcttttttggaccccaaaatgtatcagggaagccagattctaggtagaaggaacatggtcaaagcatttggggaaaagcaggctggcccctgaaatgagggacaaattaggagttaaggacgaagatagttaggacttcctatctctgaggtttaacctttctgtttctattttgtaattcccttctgctatctttgagctttcagaaaatttcgatcaatattatagtttggtcttatgttctgggagactaaaggaggggtatggttgtatgcagtgggggagccagcgacctggagaagccaagggtgacttagaggcagtggaaaacttgtccatccagggcaacctgatgtggcaaacaggcctgatctttggaacgtggatgcattcctgggtgattcttagaaacaactggggtaggagaagctcactaaagactggctttcctgcagcctcctgggataggagctaaggttgtagctgtttgcatgttaagggaagagtcgagtcttgaaggctgaagaacttggggacatgagtatcacatcagtgttaactctggtgggtggccaagtggccatatttgcatgtctcactttcaaactgggcagcagtggtgctatcacaagttccctcctgctggagcctctgcagaaggccaggcaggctgctctcccacagtcacgtgagcagatgtcctctcctgcctccatgaaccatcccgtttggttacctggacgccattatatccccctgccccaccatagtgctttctctgaactgcattttagcgtgaagccatcaacctccactgaaggctgagaaatgcgtctcctgtaagcatgttgttgaagctgccatttgcaaccttaaacgtctccttttggtggaactctaattagagaacttcttcctcatcttcgtatcagaaggagaagtagttcagctcctcagggcctggctttttttttttttcttttcttttcttttttaagtcataactttttagaattgcggtaaaatgcacacgacataaaatttaccatcttaaccgtttttatgtgtgtagttcagtagcagtcagtgcctacactgctgtgccaccatcaccaccatctatttcctgaactcttttcgtcttcccaaatggaaaccttgtacccgttatacaataactccccattccccttctctacacttcctggcagccagcgttctactttctctctctgtgaatttgactcctctgggtacctcctctaagaggaatcagacagtatttgtctttttgtgactggcttatttcatggttctggtttgttatgatcactgaattctctaacaaatcagatgtctctcctcccccattttttgctttgccatggcagctagaaaacaaagccaaatctctgcctgatccaaaataagcatatgtgctagaaatttttgatgtagcttcatcctttattccattttttatttatagtcttgtgtttttttaaaaattgctgacccacctgtgatttattaaatagttctttatacaaggcatctttaatcttctttgtaatgaagaagaacgtacatttaaaaatacaggttgagtagcccttatccaaaatgcttgggactaaaagttgctgacccacctgtgatttatcaaacagttcttatagaaggcatctctaatcctctttataatgaggaagaatatatatttaaaaatacaggttgagtagcccctatccaaaatgcttgggaccaggaatatttcagatttagaaaattgttggggattttggaatgtttgcattataaaatctgactctgaaatgctccagtgagcatttcctttgagcattttgatggcactcaaaaagttttggactttggagcagtttggatttgggatacctgaatttgggatactcagtctgtattaacaagtagttgatggagggatttaggggattgggtcaagcacgtagtgaagtgggttctcacagccgatgtgaggctcatccaaacaattgcacccatccttgcccctggacggcacctcctgttgcaggtgcaggcagtggggctgctctcactaatctcttcttccatgctgaccccctccgctccaaagtcaatgaattcagattgcaaattagaagcccaggaacttttcttataactaaatgtactggtctaagctagtgggtttctaaaagtattctgtgtcttgccgccaacaccttagtcttttagggaccccagtaaacactttctcttggaagttcctggcatccaggaatgggttagccactctgaccagtgggctttcacgggtgagattgggcctgaggctgggcttggaggtgagggatctggcttgaaagatgaggacttcttatttaaagccaatactaccaagccaggatctgagtgcttttccttggagttatttttccacactggagaattgtttgtgaccattaggccctgaggagtcagtttctttttgctcatccttgagtgaccacttaagcctgaactagtgctgggtggggtctgccactgggccttccaggggcttctccttcataacctttaccacctggcaaaccctgttgttacacttagctaactttattttattattattattattttgagacagagttttgctcttgttgcccaggctggagtgcagtggcataatctcagctcactgcaacctctgccccccaggttcaagcgattctcctgcctcagcctcccgagtagctgggattacaggtgcccaccaccacaccctgctaatttttgtattttcagtagagacagcatttcaccatgttggccaggctgctctcgaactcctgacctcatgatccacctacctcggcctcccaaagtgctgggattacaggcatgagccaccatgcccagcccacttagctaactttaaggaggactggtccgtgcaggccatgagggttgagtaccgtgtttgcagtcaggagactcaaaacctgtccctgccattcactagcagcatggctttgagctaactgattcacgtctctgaaactccatttcctgctctaaaagagggatgataatacccttctttaagagttgttgtcagagtaagggagtaaccacaaagttaataacatgttgtttttacaataattattatggagaaaactgattattagacattatcccctgaatccagctctttgcagcaactttgtgcttcctcccttgacttaatttttacaaatctcagagaattaatgctgaaggactttaaaaggtcatctggaccacggttcccaaagctggctgacatcaaagtcacctgcagagctttaaaaggcatttaaagtggaggccgaggactccgtatttttaggtggctttcctggtggtttggctttgtctatagacgtacgtttgagctacccctggtctagaccctctctctgctatttgccaagaactcttttctgctatttcaggcaggtaaaaacccatcctgtgtttacagttttcactaagcaggactccacaccttgctgcagagttcatatagtgtctaatatcctctcacggctctactcttccctttgcattctctgcttatgtctccaaagatcttgaatggcttgtgatgactgtcctgccagtttctttgtctctcaatctggttactatcatgatcatctcctttgggagatgggttctaccatttatctcttctcgttattctctgaggctagaggtttgctagactctaacttcaactcttcattccttccccacactttctcctgtctggagtttgggtttatttttcttcctgcctaactattcctaatatactaagtcaataaacagattctctgtggttacatatggcaaacagctgaaatttacagttgagagtaaaatttcctcatttgggaaaaaaacccatcatttcacagatttagaaagtggtcattctgatctccagggcaaataaaagtgttttataaccttccacaaaagcttatgccttgattaaatttttattatgaattattaattaaaccaaggaaatgcagaggcctaaaccgttgcttaaatttgctccagattgagacacaaaccaaaggcggcaagaaaccctgaaggggaggtttaatgatgagcaacacatataaaaccatccgcacgctttcatctgccaaaggctccaaaccagccatgtaaatgagcccatgtgcccagacccggacagaggctggcaatgggcctggaagaaacaggacctccctggcttctctctcctgggggtctgtgtttgggttgcatggggcactgtgccattagagacacaggggcttatctacctcatggagcagctgtagttagagggagtagctggtagtagagcagaaaagcagcctggtgtcttggaagctgagccagaggtcaggagaagtgggtcactgctctctggatggagtgattgatccaaccagagccaaccaatacagttgtgcaggttacctggagcctgggcccagtgggtgctgacatccagctcatctcctactcaccacgccttgctccttgctgtagagctgcacccactatgaggagggagaacctttttctgacttgaacaagggagtcacatggccttgcttggaggctgacagtgtgcgtatggcgtgagtgggagggatggggctgcattcttctttttcttagaacacagaggtgttgtttgggcaagtggtagcctagaactgaaccagtagatactggggatgcaaacctgaacaagactctcattcaaagagctcacagtaccttgaggaagcagacagatatacagagtattctaacacgtggggacaaggtgtacaggacatctctatgggtacccacccagatgggactggacagtggggaatcagaagctttcttggggatgatgtctaaatgagtcttgaaaagtggaaggggttgggatgagggtgtaaagagtgagaaggcactgaaggtaaacagaactgcaagatcaaaatcatggaggatgaaggagcatggtccaagagctctcagggaagacgtggagatcctgtgggggctccccacttcatgttgttgcagttgaagacattttcaagtatgagcagttattcaaatatgaactaagcgggtgatacccattcccttccccagtgaccaagactggagggcttgagaactccaagttcccagcatgatgcttggcgtttgaatgctactttcttccccttcctcacttcctcctgccctttgatttttaatatgaaaacattttaatatgaaaacataaaatatatacatctgtgtatctttcataacattcaaaaaagagctaaaaaatgtgaagtgaagggtaatagcatgatgctttggccatggtcggctccccatgattttgtgtccccgcttctgggctggcttcttacagcggattgcagctgtgccccagcaagaagctggcctctctggatcaatcactccagaagcgcagaggaaaggggagcttgcctcagtaagcaaaagtcaccattatctgattatctttagggattccctactatctggatagctagtcatgactagagaagattctgcatggagacaatatatcatttatttggcttttatttttactgaattcagtgctcatggaaagtggcacattgacaacgctgcttcctagcatgacatcacataaataagtttgaagatactgcttaataagaaccctttaaagataagagaaatggtagaaagaattgaaggatgctgtttcctttttaatatctgccatgaatcatagtccagagagaagacagccgaggcatgcagggacaagacactagcacaggggtcaggagatgggcattcacagtgggtacagctcagatccctgcctttgctttggcctgaggctgggcagacagggacatggaaagctatggggctggtctgaagggtagggtggggtggttaagcctttgctggcacatggctttgcaatcttgtacactgaataaatccatcagagcactgcatccactcacccaattagcctgcacctcatgaacacctattgtgaggccagcaccatggggaaactgaaagaaccagatattctaccaccatggaggaatgacctcaccctgggtagtaactcttcccttctgctcatctacccaaaggtaaaagaaagtgcaagtttcctagtttacattgtgtttcttgagggagaaaaggctcttggtaaaacaatgccttattcctttcgtttggaagttctttctgcagaatacagctcaactgggggtccccaaaaggcccctgaataatttaaaaaaaaaaagaggtggtgtcaggcaagggctttaggacgtagaaggtcacttttggttgttgtcctgttgatccaactgctttactaactggagctattgctcaagctggagggtgagggaatgggtggggctgaggctgggagttgctcagtagttgaccccaagtgatcttgtttgaggaaaactcctgtgatcccccatcagaatattttgaaagtggaagagtctgctggcgggaagggagaagagtgggaggaggaaataagcaacaggcagcttcctttcttgacagatggaaaataaagggcctgtgcacagctcggcgaactgctccgtggacctcccagcggggctgctttctgaggtgatggtctcctcgctccttagccagcctggtggagccagctactgacgttggaaaggagttggaggatggaggtttgtggccggcaaatgagaggtgtcggggagggagaagagaaaagcaagcgggctgaggaaaaatgtaagggagggagatggttcttcgatgaaacctctggcctcttttaaaccataaagaggtctggctggtttgattccagtccataaaatggctcagtaggatcttagggattatttagctcaaacccctgagaggtgaggaaactgaggcccagaggtcccacttgcctttggtcatggggtgagtatgtagcccagcagggtcccagctcctgtgagctgcgattcatggtgttatctttgctggggaggcctgaagttcctttagcttgtccatgtgaaacagaggaagagcccacaaggaacgcattcatctcagagttaggtgaccttggctttgggatctagttgctcattacttccactttccttgccaacatctttcctaagccttccagatcagggcacagtaccactcccttgctgccagacaggtggcctgtcgtgtgggcaggaaggggagttcaaggcaagcaaggcccactgtgaaccccctgctagaagtgctctccccttccttcttttggaggtggcagttactaggcagcatgacccagaggaggagataagctgcctctgataggaaggttttatctttgaggttattgcaaatatgcctgacttcttcatctggttctgtccggatctgaactggtagccagataaactgttggcggtcccatttcatgtatttatcaagtctaaacaattgtcaggaggcaattatcccccaggaagccaatggcagataaatagtgtcccgcagtctggttccagccatggaatctgtaagttgtccctccttgccctgtgcagattttctcctctgtccctgctgccctaaattttaaaggaggtttgatgttccaacacgtttgctttggtgttctttgcccacagccccaaataaaatctaatggtttttataggtggataaatcctttttaaaggctcttttgttatcaccatggggtttgtgagcactaaaactggattttaagggatcagtgaaaccttagaatcacggtttgctgtatctggaaggaaccatgaccacttggtacagacccttcaagcggtagatgaagaggccaaagcacgaagggatttgatggcttgtgaaggcaacgtgctcttcagagtcgggcagacgtgcagctgaagcttggtctggccactgatctgctgcccggccttgggtaaactcctggagcccctatttccttattgattacatggagataccaatccagactgcacagtattgtgagaggtagtaaaactgtttccctctggtcgaggtcaaacagacaactggggggcagagctaatgccagaaccttagtatcctggctcccaggtctttatcctttccattattctgcaggaggtcttcaggctactgttaaataaaaagtaaagcttctacttcgttccacccaaaattctagttcagtgtttcccagacagagcacctccagcgggtctgaggctcagttctatgtggagactcatgtttatacgatgacagcatctatattttttctggatgaactaataatcgactggccattgtatttaggaaaaaccagacatcacctcatggacgtctcattgaaggggaccgtcagttattccattcattctggcaaattttctttttagctttggttgcagcaggaagagagagacgtctggggggctttttgcctgttggaagggcatcactcgtccacagctggagcccctgggatgacccatcccaaggtcccagcctaagtctgaggttccagggctggtcgcaggccgtccttgcagccctcgccagagcgttgtctgcacctccgacactaggtggcgccataggaacatcctcgcggcccgaggcgcggtcgcagccggggagcactcgccacggtgctgtggaattctctggtttttcacgcaaggtcaggcgtcctgctggcgccctctcgccaccctgccctcccgtcagaagcccggctcctcgccggggaaggccggatgctggcccgccgggacctgggacttgtgccacatggagtgtcgggagtctccattgccgcgagttctacaccacagggccaggctgtttgctccccatcggtcgctgcccccagcaccctgttgttattaaggactcatttgcttggagcggcatcattacaagggtgtggggtactacatatactccctatttttctattttcgaaaggctgcaggcgcgatgcacagtgcgcttgcacggtggggcctagtgctagcccgaggagcggacgggggccgggcaggggcggtgggcgccggcctcgtctcggtgctgctcggtcaggctgtcccggcgcggcggcctcgggaggccctgccgtccttcacccctggaggcgggctggggggcgggtgcggggcgcttcccctcctcagggccctcaaaccgcaagggggtttccgcttcccagtcgatggtcgtcctctcccatccccggctgcatctccatttacccgtcgcccatttcctttgcccatccaggctccttggctccactggggtctccgttcccttctcccggtcccccctccaggtcgcggctcctttgtccaggactacgcaggggcttgaccccagggcgctggtttaggccggatctggggtcccttgtcactcccaggcttcttccacttccgaattctggagaaccgggaatcaagccctgcgcgttcctcttcttcctccttcgtgccgaaagcacgcttcatgtctgccagggcatcagttctgaaagtgagcggagaacaaggagtttctttttcttccccagaagttgccttttgtaaggactatgtctgcgccagggcttgatacatgttgctactcctgggagtgtgagactgggaagctgatggaaatgtcagcattagctttaatggtgaggccaaagggaggatggacccagcatcaagcctgggtagaggagaacgggagagggaggaccagaaccaggggccgcctgttcactgccttgaggtgtctgaatcctgcctttgctgtttgtgagctctagcactatgggtaagttggttaactttttgagcctcagtttcctgttctgtcaagtgggaatacaacttcctagctcacagagttgtggtgaggattatgaactattatgcatctacagtgtcctcctggcaagtgaaaaggctcagtaaagggtaactgttatcatggtccagtctaaacttccgtgctagcccttcaccaaattgatcttacagaaatcaaaaggttcctgcttttcccaccttgtttggaattagaaaaaacttcccctgcactattagtgttttataggcctcttctctccaagacagaaaggaggagagggtaacggggcttattttcttctcccaggactcttgaagaaggattcaggatgtggctgtgccgctggggataaacggtgtaacactggggcaggtcagtttccttgttggtacgatgggactcttacacaggccccttcctttccagcaccagatactgctacaccatctcatcggcatggacctatatgtggcagcaagtccatctcatcgcttttggtgaaagtcagtccagtttgtaaagattctcattgtgagtatggctaaaccatccctttgactaaaaaccaaaccagatactcctttacctatcaatacctcctgctgctaaaaagcagcagctaaaaagcagcaggaggtattgataagggaagtcctatctaaattcctggtttagagaatgactatcctcattttatgagttaaacattacccccaattaacacctctgaaaaaccctcccaacatgtttatctcattaatatcacggggttggcaggtcactgtagacgaggaactgggacaccaaaaggagaaactctggccacgcttgcaccctgttcccaatcctggtccagtgtcacccacagatggtaaggagctctagagacctcaccagcccctgggattggtcacctcactcttctatggacagagattcctgctgggatcctttgagggcaagcagacccttcttccagctcggactgtgaactccactgcagccgtaaggactgtctgtgacagtgagcccgagatgactgggctctgtgctccctcccggccctccaatccttggcctgccacagagaactgagctcttttattagcaccatgaatgtgactgatacagctagccattcccttgtgcgaatgactcagtttattaatgctctgctaaagatggcttctttgcttgccagcagccttaaacagtatttcattaaaactggcttaattattttgagaagacggcccaattaaaagctatacactccctctatgtgagtgtttatacatagagctgtatatataatacatatttgtaagtgtgtatatatatatgtgtgtatgtatgtgtctataaatatataggcttagcaatttcattacatgggataaattgttggaaaaaatacccaggagctggtcccctttctgttgctagattcagagtagaggccacccctccactctgggagaggctggtgttggtgatctctcaatgactctgcaatggaagtcccaactgcacagagccctgccccagtttcaggagccagcagcctcggagaggcggatcctgacctctgctctgctcttgggatagcctttcccttcccagcagggttgagatacttgggccgggaaatgttgtggcaaagtgtttgccaaagctcaggagagacacagacttggggcttttgtttcttgagctggctgtctagctttcctaatgagcaaatatgttctctttaaggaaacaaacaaacaaagcaaaaacaccaattcatctggattttattcatttgttttaaatacaaacaaacaaaaggagagtggttatttctgcaccaactatttcaaatgcaagttactccatcgctcggggtggttggatggtgcttgtcaccataggacccacagggctagttccaactgttattcggtaaggcttttttctttccaaaattcccagtgttcctttaaggcccatttagctgcgggttttgtttattctcccggcaatcagcatttaaaataagacaaacaagcattttttcctgggctgtgaatccccccggccagcctccacctgcacacctgaagccagcatgtccaatcaaatttctctgtaacccatatcccctttagagacttgcccccgtcgtataccaggctggaaatagagaacttaagcagggcaaatgtaattttaagaattgctaatgatgctagaaatctgcaatgcaattagcgtcattggatttggcgctcctccgaaggcacaaaactccttgtcatagcgcagtggcagcagcggcaagtgcctccgcatgtgccgggctgtccgggtatgctggcagccgctttgcactgagatgtgagcagttggttaggcttcctctctttctttctcacagatactgacttctttgtctcttttctgggttgcagagggatgggtattttccattgattattactttagcatttgaccctccagtggagtcaccctgttttttttttagaaaactgagactctcactttgtgaattcactgtgctctctgggatttcagtgctgtagttcaaccaccaatccccctgtcctgaactccagtacttctgatgctattaattggttcctcaacaattgtggccttttccatcattgcccaccatagtatatactttttctttctctctcttttttctaatttccttgtcttcttcactctccatggagccagaggtagtatgaagagttaaaaataggaatataaagaaagccagagggacagagggagtgagaaagaaaaattttaaaaagggaggaaatgaattattggattaaaaataaacttttacttttttgcagaaaaattatttttgctctctgggaaaataacatgggccaggcataaaaagcatgtcagctggctaaaagattgcaaaatccagaagatgatctcgatgtgtctgttcaatttagcaagggtatctactaggggatcctcttttaaatatggaggcccaaatcagaagcttgtagaggggagctattcttccaagattccagatgtgtctgtgagacaacacgttatggggcaaattgatttcacccttgggaaaccagggagattttcaaagttatgtctgcaaagccagctaatgcaattccccattagtgcattaaagtgcgcccttattaattcaaacataaaggcaacaaaataagcttttaaatttaaaatataatacatatataatgagcatgtgtgaaagccttattcaaatgaaaatacaggagtgtttgaactactgaggtatcttttgtattgaattatgagcatatgtaatagatttaattattaatttccccattgttctatgcacacagacagggttcaaggcacagtcattctctggctttcatagatctaatttgtataattattgcctgaataaaaaattgctccaattcctagctctctttctttctttcccccttctaaatactatttcaatgctgcattccaaaaggggaacacctgccacttcttcaaagtcagctgatcatttggaatgatggacggcgctgctgccgatgacgtcccctttcaagtctctttgtctaagtgaattatcgtgcatccttttaattttattgaacaaattacatttgtcaaggtctatctttgtaaataaatgataactagagacacatggatgcgtatttctgctgttcaagggctcttgttccatttctggaagccagatgaacatggaacaaaggagaaactttcctctaaaagcaattatctttctgcattcccatcagtataattatattgcagggaattttaagaagctgtagaagtagaattgaatgcttaaaactgtgtttgctgaattgctatgcaaaagttgaacaggctgtattgcatcacacaaaatagtctaactctctcctggccacatttctgtaagtttagaatgtgcctgaagggtggagatggtgtgggggaggcggtggggatggggatgaggtagatcgcatttagggtttcctgtgtttcttgaatggaatatttaatgacatttctgaaacctgagggctgttagcaaggtgactgggaatgtgtctaataaagccacccattccagtctagttggaaagcttctgatttgcagattgctctctgtctgaaacagtcctgctagtttactaactaatccatgaatggtggtgggatgaagaggggaccgttcatgaaatgatggcagcagcaattacactgctcccaaaacaagccagcagctggcttacagagatactgaatgtggtttgtgtggctactgtgtcaatactgcgcatcaaccaggatcattcctttctcattggctcccccacaatttagtgaagtaaactgttgctgtgaggtaaattgtattgtctgatcactgacagctcaataacctcattcctgccccttcccaatttttaacaaactccctgatgaacattcaggaggaaaataaagcaccagtgaaaagtggcaacagagaatgccataatcatgggttagtttagtatggctggtaggttttgagttactggacaattgatgggataatattatagtctagagatcttgaagaaaggaaacctacaagaaggatgaccttggatcctctcagagaagtgaagggtgaatcaggagcctggcgataactcccagttcacagagactgcatggaacagcgggatgagcatgggcttgggttgggatggagacaacccctggcccctgcattcagtgtctgcagtggtaagatgagggatctggaccagatgattgaatagcctatctttagattccgggtctaaggtcatgaaacccattgtatggggcattgatcaccataggaaagtgggggaggcaaggtccatgtactaggattgcattgttaaagctttatgaatgtgttgaaggggaaaaatgattttttctcataagaaaaatgagtccagtgcttttgatctctaatttctgtggctgaggtttggtgataagcaagaatggaaacccatgggatcattgcaggtgacatgatcagaaagtggtaggcccataaagtaggtttaaaatggtgccttggccatcttggtgattgaaaagcctcctctctcaggagaaagtggccagtgggactgatttgtttgattcagatcatctcactaagcaggcaatgaagggaattgcagagaactagcatgtccagcttagagttgaattcagtgctccctgaaagtgtcagaccctctgctggagctaggaataggtcatatggtccctgtcatcaggatcatgttgcatacatatgaccgtgaagccaggtaggaacatctgtgattctaggacacagtgatcggggccatgacacagttctcctgggagggagcctggtgggggctgaggtagtcagggaaggccatggaaggaagtgaggcttgagtagacacagtcagataaaggtaggggtagacaatggtaacagagggaagaatacgtgacgagcagtgacgtaaagcagcaagacatgttcaaaaagctgctaatgcttcaagatggccaaggcggagggtgagtgtgggtgagcagaaggggatggggctgaggaaatcagcaagtgccagacatgggggcctagccaggaggctcgaactttctgctctgagttagaggaaaggggaaagcactgaaggagtgtcacaggtaagcagtgtgtcagggtcagaatttagaagggtcatgtttacagctaggactggatcctggggtccctgtgcaaaatgaaaatgtggggccatttattcaaaaaccaggaaaaaaggtgctgttaaaggcattagaatacagagcgtttcccttcattctgcagcctctcaatctgtcgtggcatttttgtatcctctttaatgtcacatccctctggtcctcatggcaggacacttgtgggacaagtacagactttcacgggagctggagccctccctaacacttgggacacatgtggtccactggcagctggctcctcctctccatagccatgggactgatgtgtcatgcttcagctaggggtaggaagatgcagccaggtgtctctccttcccggaggcctggtgctgtcacccttggcaagcaggtaaccctcaagggtattgcaacttccctgtcaagatgtactgggcatcttggttaaggttgagcctgaggcttcctgtaccaagttgcctgctaagtgcatggtagcgctgacagcctggggtgaggatggccactgccacaccccttgcaagatactgtgaagcacgctcaccaaccctgcccctctccaccctgcgcccaaccctccactgaagtggagtggacagtgtcactgggacaggttgtgggggaggttgggcagggcccaaggtgccaggggcagtgaaatgggtagccgagtacctgtcctgggaggcagggaggtggtaagagatgctgcacatgagagccaagaccctaagcccccggcccatgttcatgtgccatggacttcacttccaaaatggtaaatcattaagaatttcaagatggcaaccagagagcatgtgccctcaagcatgggcccttctgagcatggatccctgtgctttgtgactacaggaatcactcacccttcatgaagcccattggcagcaaggcaactgtagcagagctaggcttaaggcagggaactcaccaggaaggggctggagctatctggtaatgagtgctgagaaccacagtgaagatactggtggtgagaatggagaggaagcaatggagggagatattaggaggtagaagctgtaggattaagaggcaaacaggacgtagcaggggtgagtgaggccgtgggatacagggtcacttacagggttctcatatgggtaactggtactttatgaaatacttttacataattttatcacttttacataaattttatcacttaatctgcaaaacatattattgttacttccatcttattggggggaaatagctgaaataagtgaggtaattcactcaaactcctctggtcagaagacttgggatcagcccaaggcatttgattttgatggcacattcaatctaccatgactcctctgctgctctggatgagtctgccttgtttgtttgttcattcatttatttattcattgcttcactcagcaagtacttatgaggggagcacaaggtgctgggcattcgtctaggtgctgaacaagccaggcaagccttccgctctcatggagtgcacattctagcagggcccaggtgccagatttaatcagaagtttcgctcgggctttaagggccagtggaagcaattatttatttatattttctgtttcttgtcccagtttctaatgaattagagtttgattagcttcaacagagcgctatgactagagggagaataataaagtgtcctttcatccacccctatccaaaagctgtgtgtaattagaggaatcaaaccctgtactcttcatctccacctgggttggcagaggtcagtttattctgtagatatgtaattatgttgttttgctctttcatttaaaaaatatattatctctttcaatgaatcttataaatctcaggctaggagactggatacccctgataaagaataaatttctaggtgttacattgttgtcgtgccaacagcaatggttctgaatgctgatcagatgactcaactgtacaggtcagaaaggcattcactggcaactcagcccctcccaatggcttacaccatagaagaccatcagtaatgcatgtgttgaatggtgttaggatgaaccagttttcttccttggtgcacagccccagggaactagaatggctgccagatggctccgggtgctagggcatgagcattcattgtgtgaaggaagtgtggagactgaaatccttttaaagacaatgtttcacttgataggaaacaacattacaataagactaatcaagaccactgagttagtagtcatggagaactaaaatcattattcttgcagcacaaattcctggacctgatgatacctctgtggcctgtcatgtgtcagagagtctgcaggaatgtaacatgaaaacctgtaataccagaggtgtagagcacactccagtctattcactctggaatgcctggggatggcccttggcttctgagctgatggccaagagagggtggaagaataagtggaggagttggtcttagaaggtctgctctacagtaggcctggggagagtggtggatcaagaggaagattcaaaccaagtgcattgagggatctgaagaccatacccataccaatcagtactcccctggaccagcgtcatcatcctgggccccatgtggctgcccatcgcatacaggaggcctaattgtatgtctgctgtgtgtggcatgactccttcgaatggcgttccttttcccaccccgtggcattgctctgctctcgcagtctctctccatagtaacagaagcttccactgagttaacacctcaacctattaagcttaagtgcttttcaaaacattttattattggctgagtgtttgtgaagcagtttaccttggactccgactggcttcaagaggtttgagcctgtcttgtattccagggaagcgtcattgcaaacccagcacccagctttccaccctttctttacctctctcaccaaatggtgtgaggccattcatgggaaggccacgatgaattttgatttcagtcgttgtatcattacttagctaatttaaagatggatatcggcccttaaaattaaaaattgtatgttacatggaaggactccacccacccagggtcaggcaatgagtatatgattagacaaatgagggagtggtgctttccatgttcctctgttgagtgaggatcccggtggaccatgtcctgggtcctttctgggacacttcctggtgtcaagttccctaacttctgtgggctgccaggcacaagtgtcagcattcatgttgcaatcctgatgccatagtgtggctacttcaaggagatagtattcataatattgacctcttcttaaaattatttaaataggcaccccagtgcttcaggtaagcgccatgaatcttgagcaaatttgactcatgaggtaacttcagagaaccattttagctggtatgtgtgtgtaaggtggggcaggggtagggttgggtattaaacatcaaaaggtcatgctatgtaatacatgcaatatataaagtactgattcaatagaactatggcaggtgctgttgtaattcttttttctgcattatgcagaatttgcaatataaaaattaatgcatgttataaacttaaggtagcttcagcaaataggataaagaactccatgataacaaatcacagtgtatattcaccgctggtgagataaattccattcatgaggagattttgatttcaaccccttataagagaattgtaagatagtggcagcatctaatcttgaggtaggtagatagtggtgagatggctactcatgaataattttaaaatcaatcatctgtggctaaatgtagtgatttcaaatcgcttcacagctttgggctgtggaggggaaaagccattgtggtgaaatagagtaagaaacaggagatgtaaagctttcctcatttcttgcttcaattcgatccctgttctttaattgctctgggacttaagattccttttcctgaagctacagtgtgttctacatcttctcagagctgggtcctgccgccctcctcacacagcgggtgaagctgctcccctgcttccagctgctggtggctcagcaacttgggggaagcccagtttgctacctttctggacatcctaggggacctgcagttcagccacagcgaggcccagggaggggacagctggtgtcctggcagctgggcttctgcactgcccatgactttgaagacacagcatcagagaacagaatggtgccttaggtttctggagggtccttgaactaaaatgtgatgagaaaatctgtgtcaggagaagatggcaaggagggaagagtggtcttctggccacagcaggactcggggtggtgctgggccacagatgtgtgcccacctcattggagtgcagggcttgtggtgggagctggtgggcatagcagcatttacactgtacaaagtagacactcttctgcaaaccttcctcccataactccctgccctcaagtgtggcctaaactgcatgaacctaaaacattccaacagtatattgatgacagctaaactgtcataacacaacaacatggttatattgaatgctgccttttagccatccatgatgtctctgtattggtgacaaaatattttcctacaaccacacatctgttttcactctcaggtctttgtatcatatccttattcacaattcaggatgatgatgacgatgatggtgatggtgatgataataatagtagctaacactatgtaatattaggcactacgcacatttcatctgttaactcatttaatctccataagacccacctgaggtaggtactttattatttctattgaagtaacataaggtcacattttggtaagtggtagaaccaggtttcaaatccacgcactctggctttgctctctgtgctcttaaccactttgcaatggtgcctctcatttcctctattcttaagtaaagaggagagcaactcagaacaattacctacagtattcaaaggttagaaaattttctgttagttacaaagtatcagcaaccaatccacatagcccagggaattagctttgcatttttgcattcttgcatgggtgcattcagaaatttattgattacttaccacctgccagaccaccatgctgggagtaagaccaaggcagacatgctccctgacctcatagagcttccactcattctggaaagttaacaaattaaataggcatcacggtgatgtgtgatgaggattatgctagatgaaagtatagaataacaacagctaatatttactgagcattttgctatgtattgtgtgatggttaatattaggtgtcaactttactggattgagggatgcctagatagctggtaaagtcttggttctgggtgtgtctgtgagggtgttgccagaggagattgacagttgagtcagtggactgggagaggaagacccaccctcgtgggtgggcaccatgcaatcggctgccagcccagctggaacaaagcaggaggaagaaggataagctggcttgctgaggcttctggcattcctcttcctcttgtgctggatgcatctgtctgttcctcctgcccttggacatcagactccaggttcttcagcctttggactcttggacatacactagtggtttttcgagggttctcgggccttcgaccacagactgacgtctgcactgtcggcttccccacttttgaggcttttggtctcagactgagccattactggcttcttcttcctctgcttgcaggcagcctatcatgggactttgccttgtgaccgtgtgagctaattctcctcaataagctccctttcatatatacatgtatcctattagttgtgtccctctggagaaccctaacacatattgctaggcactattctcagtgcttttagtggactcattcatttaatcctgatagctaccccatgaggtaggtactattttattcccattttacagatgaagaaatggaggcacatcagggttatagaaatgctgagtgacacagctatttaacggtggagccagcagaacacatcggggagggttagctttgcctgggagtttgggagtccagtttcaatcaattggtgagcagtactcatggagacaatgaaaaatgggaggtccttcattcagttggtgcctttgttcattcaaaagcatttattagtaggcatctttgatgtgcaaagatcaagggagtgggtggtggttggtggtagatggctatagagttgggtaacatagggtgtttacatttgagacataattcagtaggcaatactgtattaagtatttaagggtataaaaataaagaattgctccttagtctcaaattgatatattttaaatatatatataaaattataaaatgataaaattatgcaaatatattcatcacctcacatacttatcatttctttgtggtaagaacatttaaaattcaaacttttagtaatttagaaatatacaatacgttcttattaactatagccaccttgctgtgcaatggaacaccagaacttgtttctcttgtctgactaaaactttggactctttggccaacatctctccattacccactccctcctccccagcctctggtaaccaccagtttactctctacttttcggagttcagattccacatataaatgaaatcatgcagtatttgcctctctgtgcctggtttattttacttctcaatttaatattctctagatttatccactttgtcacaaatgacagaatttcattcttttttaaggctgaatagtattccattgtgtatatataccacattttaaaaaatccattcattcattgatagacacttaggttaattccaccttttggctgttgtgaatagtactgcaattaacatggcagtgcagacatctctccaacatactgattttaattcctttggatatacccagaagtgagattgctggatcacgtggtagttccattgttagttttggtacatatttaacagaggagttcaggcagatgaattggcttgtgcttgtaggtgcacacagagcttgatggagtggagagtgtggccttcagatgggagcaggctccacttctagcctgcattgtcatacctctagctgtgtaaccttgaccaagccttggacttctagaaccttagaatgaagaccctcattttacagatgaaaaaactgaagcttagaaagttgtcataagctagaggaatatttgaaaatggaccaattctgattcaaaagtccctttcagccccgagacatagaaatcttaacttgtaagtgattgttgagttttccgatactcaatgtacacattagaggctttaacaagctgtatatttgggaattcagtactaaaggaagccttcctagagtcaatgagaggaacttccaaggaagagaggaaagcagcacaggaaacaagaaggagatgctcccagcatttgggggtatcttgggtgggagcttggaagtaacatgaaggagaattgtggggccacacaaagctagacttggctggaatgaaggagggctgcaagaaatgctgtagggccagtggtagtattggggaggtttgggaaagcagaggagataaggacagaaagaatgtttccctaggttgaaaactttgtcttgtttatcaacatacccaagggacacttgcgcaagtaattgacaagaggtttctgtgctggtttcggttgctttgggaaaatggaagggaagtgtttaattacaagttcaggtggtagaggatgaggccttcaaagcctcccacatgggagcaggataattcttcctcttcctcctcatcctccttctccttcttcttctccttctcctccttcttcctcttccttttcttcttcctcttcttcttagagacaagatcttgcttggtcacccaggctagagtgtggtgacccactcatagctcactgcaacactgaactcctgggctcaagcaatccttccacctcagcctccctaatagctgagactacaggcacatgccaccacacctggctaattaaaaaaaatttttttttttgtagagatagggtcttgctctgttgcccaggctagtttcaaactactggcctcaagcgatcttcctgccactgcctcccaaagtgctagaattacaagcatgagccactgggtccagcccagaatttgtataatctacttgcacaaccagcctttcagattcacctgaagcctttatatcttcaacaagaccactctttagtttggccccattcacctgctagagttggcgggggtggggttgggggtgggggggaggtgggggaggaagaatgcagacataaaagagtttcctatttcctcttagacagtgactatatcatgggcatcatctagtaatggagagaggaaaaagaggaagaaataggagagagagagagagaaggtttgaggggaaggggaaggtacatagcacttggtagctccagttcctttgagctagatgctcccctggctgatgctgcttcgaaagccatgttgatgtcgctcaagtctgtatgtgatttctttcctcattttcttcctttgccaaaaaaacaactatggctcttattccaagtatagtcaatgagcagttaccaagagggtcctagaaagcatgtttctgaagaatgtcatctcggcaacgttgttccatctgcaccagtcagggaggaatggaggcagaatgcctccaacacacactttagatctggagatattctaaggtgtaagggaaggatggtctcttctggagaactttggtttaatccctgaataccttcccccaggagtacaacatggatatttcctcagactgccagagcattttagagtgttatttgaccagtatataagagatatttgctgtaataaaagttacactgggcttggaatctgaagactttggtctgcgatctggccatttttacttcctagctacgggtaagttgccttcttcacagcctggtaatgaagagcaaatgagaaaaatgatgacaacactttgtaaactgtaaagtggtgcaaatattacttgttattgttacctagcaatactcggggattttccttgtttggttccagtttaagtaaccagggcctgtgttaggcttggaagcttcaattacaactgaagggtgaaattaggtgataaaggctttaatataggttttgtgttgaggacctaagacaacactaagagtgaaccctgtatgagtccacaatcctgaacagttgctttgggtggtagctagccgttccttctcaccagggattggtcatgtatttaatggcagactctcccttcccctaccttccctgcttccccacgttttcccctgggtgtcctaaaggcttggcacccttaacagtgccttctcctcccatgggctcagccacaggtatttcttaggagtctcacctcctcgggtgacttttccagcctgtcttcctggctcatcccactgccttgtctgggctcaacggctgatgctttgctccatttcagttcccactttccttctcctcccttgacttgatacttcctactcccccttgcttcccagggtcccttcccctcccatgttgatcacttgagaggagaggtaggtgactgggtttcacagccccaccttggggcaggttggaggtccttctgttggaggatgtatttggaagtgttctgaccaaggggtcttctcacgctcctcagcatttcctaaagtgcactttctgatggcgtgggcactccactttcactgtggctgctgttctactgttgagacacttccctatttcaccggacagtctctttgaagcttccacagttgcccattacattttgctaggaacagggagtcacttctctctggctgggaggagacctctgagtctagtcaggctccagggtccctggatgactggcttttgcctcagtggccttactcttcctatggcacactcactgtccgcctctactaacctacaccaccttcttagactgctgtttgcatcttcccaagacagagttttccctgtgaccacttgtgcctacggatgagtcttaagcctccaagtcttcccaagaaactgaccttaactcaaggatcactttgttacacaccaggctacttcaatcctctggccttgtttccattcttgatccctttgatctctgctgagccttgaggcttatgatcctgtttcagggcttcagtgattccccttgctcccagctctggggactggtctgcttatcctgtctccagtccccatggttggagctgcgaagcaagagcttctgggcaagatgccactagaaagcctgtctccctaagaacaacagaccgcttttctctctagttgttctgaaacttaccccttctctctcgcagctgtgtgaaaagaagccaaatgcccattcttaatgtgtgacaactgaggctcacatgcaaactgctgttatctcagcaggagagcaatttgcaatcatttaaaatcctttcactcttcccttctcctcagtgtatggttatacacacaccagtccatatttattagtgcagatggtgagaaactcgtcattgaaagggcttagagcacagaggaaaatggatttttggcctcactctggccttataaacaagaaagcttaaatgattttaggttcctgattcttgcctcaaaagagcacagtttgcttctctccaaacacaagaggttgtaaattggtaattcatctcaaccaaaggccacatgatgagcaattgtagaagtattttttttcttgttgtgcaaaggaggaaccagacatctgagtataggttccagctggaatttgcctttcaccatttgtagcctaaaggcactgtcttggccagccctgggcttcgtgcagcttctgcctcttcacctgcatcactaacagggcgatcgctatcacaagggtagaaatcagctcagcatttccatgtgacttcttttttttttcccagctaaaaaataaatctgttctaataaaaacatttatactatattctttattgtcagctaatcctgcccaaactcattaaatggcagtgtgtgggttatttgctgtcagtgaaattatcaaaggcatttttcagctggggcaccaggaaaacatatgcttcaatgccaactaaaacaataatgaggaaatgttatgatcagtcttgaccagatgaccctgcccattttagattagttcttaatttcagcacaagggtcatcctgtgaattcttacaataagtcactgctcaccactcacatgaaaaagatgtgacttattagaaaactcactgtactcattgcagttaatgagatgtggaaagctttgtaatttgatttgctgggccatatgctgtaaagggatactgctgatttcattcctccgtatttaatttaagctgtatgcaataccttcttcatatggctacttatataataaaaattaacttggggtataaaaaatacaccattgtggggtttatgacttggtgtggttcagtttcaagtgttttgcatggaaacatctgtaagtaatgtgtgcgggtctaattttaaatcccgccaaatattttccatttaacatttggtttaactgacaggcttgcagaggtggttttcagaattgtcggtaacagatatgtacagtattcccaaggccgtagccttttttttttttaaaggaagatagtaattcaaacttgtttttttttaaatttttttaatgtttacatttcagtagatacaaatagcagttcagaatatggctactcctgtcccttgaagacccagctgcagttaaatctattaccccctaaaaagagttaccttggttttgacttttgcttcaacatctgcgagctaggacacctgaggctgactgggaaggttgaccgtgggaacgggacccttcaggacagggtcctgcctccacagtggagagagacagggagggagagaagagggtaggactgagaaggggggcaatgtccagggaggtctgagcctccagagaggctccgagaatccacattcggactattttcctaccgtttaaaaataagtctcacctaactcttaggagaggcccaggccccctgaactatcccgatctgctcagaagctgagctgtaaaaccataaaacagaacctctcctttctctactgggtaggattgccagataaaatagaaggccccgagttaaatgtgaatttcagatagaccacaaatatgttttagtacaaacatatcccttgcaatatttgggacatacttatactaaaaatgtatttgtggtttatctgaattcaatcttaactgggcatcttgtatttttacttgctaaatccggcgactctaccgccggggtcggacgttgtttgctgactgcattctattcgtggccgcggaggccttatttcaggttgtttgattccggtggctgacaatatgaaacagcttgaacaggcaggccggtgggcagaagccataaatagccacctcgggggggcccccctggtcgctgggagcgccacgctgctctgttaataaacatgcgctcgctggagtcctcatcctggggctcgcggaagcgctgactcagcaccggggcagggaggatgcggggacccccagaaacataattaaactgtttccatgactgacttgaaaataaaattgtgtgtgggaagagaaacttgagggggaagttaaacaacaaatggagaggtgtggagtgaaacctcagggaaactgttggttttgcttcaagggaattgaattgtgaaacttgcagttgtgaaatttcactcggttgattcttgtgagaaccgaagtttgttttaattgtcaattaaagcgaatggtgcttgggtccctgggatccagggaacctcagggcggtgctcgcctctgcccggcagcgagagagggacccggtgcgggcccgatgacagggtcgaccgctgggggtcaggataagcttgcagagtggccccgccgccgtcctgaactttctcgggaggggaaggcggctgtgtacagaacagcacgccctgggaagcaaaggcctgtcggagaagttgatgaaagatgcaccttaggtgtccccgagcagggccgccggcctccccagaggtttccttggcagcccttatttgtaaggcaaatccaggcccgcgcacacgttgctcgaatgtcaggtactaaattgcctttatgagagtcgagcaggcttgccgatgacaacactctgataacaaaagaagtgtggcctcgttgaagattttatgtaaaaggaaatgattcatttgaattcagaaggagccttaaaacagggcagagacagccaaaccctagattttctgccttatgacttgtttcttaaacttgttaaagaaaaaaggggagaaaacttaaacaagaaaagctaccccaaatcgccagccaaggtttagattttcgtgggttgctattttcttcagatcaaggttgccttcttgttaacccgagactgcagccgcagaaaattagattccccccactcagggattaaccacatagaacagttagggaatgtggaggtctggagagacttgagatcaacgagttcgaaacgtttgaaagaaaaaaatcttcagtggtttgagagcttcactaagatactttaaaaaaaaatcaaaattgctcttatttaagagctttggagatccaaatataagtcccttttcttttgccaagaaggcccttattcattttgtgtgtctttaatgctcaaaagagatgctgggattcctagtcaattcctaaacaggagtctgacaaccaactatatgattttttttgcaaagacctttttttttccttaaagcttcaaatttctgttccttttgatgatgatatgttgaagaaggaatcagtgcctttctcagtaagtgaatgacagaaagcccttacatcttttgagtgggccagcgtttgggtggcagggctgcttggatggggagcgatgtgacagggctcttggacaaactgctccttggcttagggatggtttattttgaacattcattcattcacttattcaaccagtgtttattaaacattcacggcctctgtgcagggctaggtgtgagggctacagtgtctaataacacagagtcgtggtcttaccctccaggagtctgcagtctgctggggaagccaacaacatgagaaggttattctgctctactggaaaaggcactgatcttgtcctctctttttcttccagaagcaagaaaaaaacccagattggtcaacacagttttataaacaagtggtactttagcaacagcaaccaaagtcctatttaattagccagtggaaggtatccatctgtgatggccaactgtttcctttttccaaggggctcatcttctcctttggtgacccaaaatgccttttactttgagccacaccctctgcctgaaatcctgcaggataaaatggggatggaggtagaaagcaagtggatcacttggtactgtctgacttgataaccagctgttgaatggcctgccatggcttcactacaagaatggggaaactgttcttttacgtctggaagaaggagaagccagaagtttatttaatcttttctaggcaacttattttattgcatttttaatttcctctcttgcattaacatgacccttttcactggcttcccacgcctggtacttaattacttatcattagcaatgtacacgggggccttgctgcatatttataaatgtgatcattagtacatggaaagacaaaggcttctttaagactgtcattagttattctgttttcatggaaatgttcattaggagaaactacccacctggttaaataattataattaagaattggtaatctcctttgcatttttaacttgatcttccgtctgtttgtgtgaagctaaacaagccttatttggcaagtattctatctttcattttcacaagaattgtcaacaaatacgtactctttgtttttaacctataggtgctgactgatttgcagcatgataaatataatttttgtaattcagcagttaatctccaaacacgttaaccagctgtggaatggtgagtcagtgaatggagttaaaggatctctggttgattttattttctggacttcagtcagtggtgcaaattggactccagtctcccagtcaaactttgcaaagggtcccctttaactcttcaaccacagagacaccacgctgggtggccactggccactgctcctttgggtgtgccaggcaagacaggtggcagttggatggcccgagtctttgtgtgtcagcatctgagtctttatgtgtttgtgactaggggtaaccacagcagtgtcatagctgtggccctgccaatggctagtcaaatagagtccacaagcactgtttgaattgctagcaaatggtcatgcggctcgtacgtggttacgtgtcagctgagctgaaacaaacgaggtgacagaaacacaataagggaagctcggttatgctgccgcccactcccctctgcccagactggttcaagccgccaccctggactgatgagaatatgccagggataaaccacaactgtgggaaatgctgggtgggggcataaatatcatctgtaaacaattaggcagccactgctcattcagtgccgttttgagaagctaaggaagtccgcaatcagttatatctccaattaccataaaaatatattagccattcattcatttattaatgattcatcagttaaccacacataatgagcaaataattagcagtgctgtacggttgccaaaattgaagaagtgttggcattttaaagatgaaaggttgaatttatgcagaagtctggtgatgataaagttaatatggaagataattataaaagtggctgtcctctattacaggctgaggtaccacaaaacttgcctaattgaactgaaattaatattcttccaaagtctgtgtgttgccacacacaaactgctgaatttctcttgaagatctcccttcagtaaggtgcaccgcacaatacaagttaataaaatgccagacagctagactgtgttctttgtttgcttggttcagggcctcgtggaaaacaataaattgcattcatgtcagctgaggcccatccctttgctaattaccgtttggtgctgaaatgacttctgtgaaattgggagcatgaggaaacatacagccatacaagggaggcttttcagagttttgcagtaaatgtgagataggcctcaggcacacagatgttaaaacagcgaattcccccacagattacactaatggaaaccctgtcagggtaagtcaaatccgggtctgtggtcaaaatctaattaaggtttctgtacttaaaaagaatatgaatgcctgggggtggcgatgaatgtataagaaactcacttgtttgtaaaattgttagcatgaatagtaagtaccgtggggctgttacctgcaatgtaacacctgttttctgaggctttgctgaatgtctcaggatgggttatttcagaggtcagcaaactaggctcaggccatggcagcctcccatctttggggcctggggcacggcatggtttgaggtcacagatgcaaatggatcccttagaagttgccctggaatcccaaaggatgctttactttgccacatgaaaaccaccccagatgatcctgcccaactgcctggcgccactgaggaaatcgttcttgccgagggtgttggactggccaaatctcccctactggggaaacaaagggttgtctgctcccggctcgccctccagcctgtcgggactgcctcctggaacagctgcagcgtgcaggcgcagccctgcttctaatagaggaaatgaatttataatgctgcagtctcttcattttcacccagcacaaatttccccttaaatacttaaaaacaacacccagagctggatataccttaaatttccaataaatgaaaccttaatccagtctgttgctgagtctgagctgttattaaagaaataaatttgaaacagcaagtggtttgagaatttttgaatttaattatttaaatctacttagggcaactgtcacgcgctatttcagtttcccatggagaacatgaattctgggaaaggtatcccacgcagggccctggaaatattaactttcatgtacaactgtgggctcagccatagacagactgtgccaccctcctccccggaagagcagaagaaagaaactcagatttctttttctgtatgatccagccaagggatacaggatatatttttcaaagaacgagggaagccaagtcctcttctttcaagttctgtgggcctcttcagatgcactgtttacatggagttcgtttgaagctctttggagagcgacagttcatacagtcattcactgagcaacgttagggagcaaaaggtaaagagaaagtgtaacctgtatgatttaagtggccgacagctaatttagggtgtgctctggcctcgtgagtgtctggagcctgatttttgacatttgtgaaaatggaccatctgctgtgactgtcccaagggtgatagcaccaggcttgggctggagcacctgagacttttggtgccacttcagtcttcaggcttggagagagtctgctttcatgattagagacagatgacaccctggccttagttctgagagcgcaggataccttccagatattagcaattgagatttttaatggcatccacattgggatgtgggcggggtagaaggtgaacaatttaggcacacactcgtaagtgtctccttctccagttcaccgggactttgctatggcacaagatggctttgttttggaccctgtacaagttggttaaattaccagatacctgtgaagcatctcactagagcatgatctcaccaacacagtgagaccccaagacctgagtcagagagatgctcaatatccaatttgtttctcttttgtgctagccatttgatagtagttgggacctcagagccgccaagtggaactttcccacacccaacccagactaccaagaggatattgacttggagtgatttctagatccagagttctatttttccttccaacataaaaatcttcatagaagccaaaaatctttaagaaaagagcagctcttagtgtggggcccgtctcagcctctaccttgtacccagtaaatgcaaagggctgtggaaattgcacacaattcacagtgttcagaggatgagtgaatgttttaccatctcaaagaggagattatggggttccacaggaaataaggtccagtggctagcaatgcctcagaagtcaagagttttggggtttatgttttttaataatggtagcaaagacttataggtaatgctgggtatttaatttaaaaaatctataaatatttatggaataaaacttctttccaggtgcagttttgggctctaagacttcagagagaaaaagtcatggttcctgctcttgggaggctctcattgtgtctgggggagcaggcaggcacccaacagcctgaatcaaactccatgtagccaaatttctacatcattacaatgcttagcatgtaggaacccaataaatgtttgttgaatgaatggatctgttaaaaagggagtgtcacgctttctctctttctaaggagttattgtgtgaattagagggttaacatttataacaccttttatgcccctacatgctatataagtacaagttattaaatatcataataaactagggtcctaggcagtcaattacattttcttctgaagttagtgacatttagattcttttgttgggcagatggtgtaatattgcacctgttggaagagtaggcattttgggaagggaccttaattcagaactatttataatatagcaaagctctggcttcttaataaatgtatttgtattgtttctcaaggaggtaacatagctgaacagtccgactctttgaattggaacttctgaaattggaagaccattatttcttaaaactctatttactctacattttctcttcactttcttcacttctgattttcttttgcactctctggattggcttttaatacccaatttgtttccagccttctctctcctccacatgtctctctgctcctcattcctctctcttcgctgtctccctccatcttccttcctttccctctcctgccaagacattccatttctctggaatgcccctcaagccactttcgagtccaactaaactatggtctgttgggaagtccagagctgctgtttctgcttggatgtctaagctttccataatccacccacctcctagtctacttctgggcaagaaacactgcagcggccaggccgacttcatcattgctctgcaaataccatgtttgttgggcctttgctcttgttaatatctcatctggaagctgtcttcttctgttacacctttctaaagtccatgtatcaattgactgtctgctctttgaaattgctcttatttacttccttgatctttacctcttctaagctcccagtgcccacagtttagcaaccccttttgttgcatctcataatttagtagcttctcatataggccccaggcttcttctatctagaagctacagtgttccttattatgtgccaggctctgattaaggtgcattgcattattatttcatttaatctccatgacaaccctatgaggtagacatttttgtcatttccattttacagatcaggaaactaaggcccagagaatatgactgacttgcccaaggtcataaagttagtaagagctagagctaggttctatggaagtcactatttgctaccacccagatcccccttcaggattgaagccttactcctccagctgctgagagtaccattggctgacagccctcagctgtctccctctctgctcattgccctctatgtaagtgagcctcttcactcaaggtaacaacccctttcctgggttagcctgtgtccaaaatcttatattgcagggctataaaggtctctccacttcaccacaacttcagaaaactcctaagtgcaaatcagcttctgagctctctgtgaggttaactgatgccttctttgtgactgtatcacagcccaacttctcccttgacccagtcctgtttctttccctgtgctttcacttctatgaatggtgatttccaagggcaggcactgataaactttctatgcaaatccctgattcaaagtctgcttctcaaggaacccagcctaaacagttggtacaaggagtggtccgagaaaggcaatgctaagatgggattctggagctagatcacctgctggctactgatagtgaggacctcatctctgggagcgggagtgggtggagcagagtagatcctggcacagggttgcagtgatgatgtggaatggtatgctggtgaaaggggatgcactagtaggtgaatgtaccaggcactggagaaatacggggaaatagtaatgataagagcaatgacaacggttggatattactggaggcaattaatgcattggataagaaggcaattcataagcaattagtatgtaaaccacagggcgtcactactggatatcaagtaagtctcatatcctgtagttagaagccagaaaaagttgatatcagggctaggacttaaacataagattgagagaattcctgggaaggttgaattctcaacctaggcatgtgcgctgtgccaggcaaggttctgattgggaaagaacaagcccttgagatattagatggtgacatctgacttgatgcacttaaatatcttgagtctccagattcccttaaactctctgggcctgcagaagtggcctactcctgtctgctaaaggctagcattactcctctcttgcttgaagaatatgcaggggcctctgccttagaagacaaatgtgtccttcccactttaagatctgcccccacggtccctttcttggcagccagactaataaatagggttaaatcacagcattgcctggctggggaagtgctgggcccactagcaaaggaaaggtactgcaggaactgcaggatgtagctaacaggcactggcagaatatcaaacattatttaaggactgggttctgagagtactggatcaaggtagatggaatgtaaagttatataagggaaaatttatcaatatgggatcactctcttgggctacaggatttagcatctggcaaagatcctgggatcctgctaatgtactgctaggatggctctcagaagcttggagaaagtaagagctcacataaaaggaagtagaaatgaattactgtgacagttggtgggagaaaggacaaaaaagctcagagaaatgggcatggcaggatgggccagaaaacccaccaaatgactatgttcagtgagagggttcaaagcagaggttacacacattttgaaaagcaactcttggcatgctttgtgactgtacctgttagtcatccaatggtgatgaagccagaactgcccatcatgaacttcttactgtcagaccaaatacattataaggttggtgggtgaccagaagtaattcttataagatgaaaagggtacatttgggactggacacgagcagggccagaggtcagcagtaagttgcaggatccagtggctcagactgccaagttttcatccaccaccatcatgttacctctgcctcagtgcacacctgtggccacatgggggtcccttatggccagctgatggaacatgtgaaaggttgagcttggttcatgagaaggttggcttggtatgtgggtacaagctgaaaatgaactgctgctgcactttagccctactcagggtgaccttgaagtcactaattagtagaaatcatcccaatgggcatagctttaagtggtgtacctgctcatccactttgtgtggaaagagaatatgtctaagctcatgggcagtggaaaatggcttagtcaaatggtcagaggactggaaggaaaaagacaaggggatttggggaacgggtacacatacaggagtgggcatgaagtgtgaagagttttgtatcacatgttaactaacacccaccagaaagtattcaacacaaagatagaatgaccaggccagttgacgtaagccagcctctgccatgggtcacagcagtgctggcacaatgggtgcataagcggagtagccagagtggtagggttggaggtgatatatgggtccacggcatggctcatactcaccaaattaatatagctcttgctgctgctcaatctctgattgtcagcagcagagaacaattaccaacatgatactatcttttgaggtcaaaaagaagccacttggtggcaaattagctacacggctagaaggagcaccgattcattttaacttgaaaaaatgatatttcacaatgggattgcctttccctgctgcagagcctcagcctgcgccaccatctaagagcttagagtatttgatatgtcaatagggatcccacatcacattgtatcataccacaggactcactttatggcaaagggggtgcaccggaagaaatacagccaatggtcctatctcatatagcaccacatagaagaatctggtctgctggagtgaatggcctgttgaaggcacagtggagggaccagcttgaagatggtatctgcgaggatcaggcactattctccaggatgcagtgtacactttaaatcaatgaccattacctggagctgttcgccaataggcggaacacatgagttcaggaaccaaggagtgaaagtcactgtggctctgcttaccatcactcctggtaacacacttggggaatttatactttcctttcctacaattctaggttttgcaggcttagaggtcttggcttccaaagggagaaagcttccaccaggggacacagaagggtcccattgaactctaagctatggttactggtggggcacttcagattccatgtgctgaggaaccaccctcttagcagcactatttgatcctgatcaagaagaggagggctactcttacacaatggaagcaggaagacctatttttaccacccaggtgagccatttggatgttctctttggatggtcccttgcccagttttgaaggtaaatggacaaatgctgcaaccatggcctgagaagaggctgagaggctcagatccctcaaggatgagggtctgggtcactccaccagttaaggcacacagacaaaagagatgccagctgagggtgaagagaatctaaaatttttattagaagagagagacaatgatatctattgcaatattgagaccagcagatgtagtctgccccagccacagtagtaggggctgtgtctgcacagctggagctggtggggatacatattgctactcttagtgactcaagttccttaccttccagtctacacaatgatttggttcaaaaataggcctcccatttctgatataccacattagatgtgttggatggtagttaccatttttccacagccttttcatattgtttgaagacgatttttcatccagtgaacatttattaagcatctactgtgtgacaggctttgtgcttggtacagggaatatgaaaatgacagagagaaataagaaatagcccttgcccttaagggccttgcggtcaagtggagcaaaagataattaactactgtaaacattatggtgaatgcagtggtagagctgagcatagaggagtgatgccttatgtagttggagaaggatggtaaaggcaagtttctaggaggagttgatacctgagcttagccttgcggaataaaaaaagagctcaagatatggcaggagaatattctaggcagagcaaaggtacacgatgaaaaatggcatggatgagtgtttctgtagcatagaggacaaggtcagagatactgaagggtcagataatgaaggctcttatagcccatgctaatgagcataaacttcactgtgtggatgatgtggagccattgacagatgttcagtggggagtgtggttctcgagtgtccttcagtctattttcttcagcttcctgcttgcagtcacctctgcttgagtgtcttttagtcattgtctgtggcatcttacaaaagccctacctgaagcatgtggggatgacgtgtttacactaacagcaaatctcagttctggcagatagcaagcaaatctggctgctgaaaagacatccttaaggtcactacctattggtagggtcttcagcatcagagttgctgatgccttttcagcttttctatattgctgaaaattgccccttttcccgcaagttatttaaaatggcagtgctcaaaggcacagcaggggaagttggtgattgattatgggcccagagctcccaaagaacactggttttttgacatcgtcatccagaagttcctgcactttgatagtgctctgaaaggcctcatgttggcgtgagctactttgctaagtcattaacattcactgatgatagttctgaagacagagactccatacaagatcgtcacatcatcctagccacaaaacctgagatgtcagcatcccaagggagcttaaagcaggcaatgaactctgatgatcagacaatatgttatctagtgatgacctgaggggcatggaaggaaaaacagtcaggaaagaccattatgtattaggagacaaggagacttggtagctatttccgcaataagctcctgaccaagttaaaggtcaacattgaatcgcagggtgaatccagtattccctgtagatgaacttaaatatgaggtagaaacctttggtttcttggttgttttctttgctaataaccatacagaacacatattggttggttagaataatcgacaatgaatttgagaactacagccagtctactgggatagaaaccatgtttgtttgcagaaatgtgatatttttgaaaaattataatgtcagcaggatgtcctacttgggcaactgttctaaattagagatccataaaaatctctaaaaacggaaccatttgtatcctgggttagtacttggtcttccctcatttcccatctagtccacatagacataaatgccagatgttgttccagcatagcccaaggtgtcaacctacatactgcacacagagactcagagtgaggctttgctactgaaaatcaagtttgaaaccagacatcataattgatgatacagagtgccctttagaaatttgataaaagcttaatgtagcaaagactgtataagacaacaacgaaaggtgaatgctacaaccaaaattgtggggccagccttttgtgagtagtttttgtgagcaaaacacctggtatagattgaatgtgggaaaagcttttaaaagttttttttaaacctattaaagcaactgttaaatttaatttaaatgttttagatctgcataaaatggtcatatttccaaatggatggaagaactgaggattgatagttctctaggagtttctagttttctaaccatgtctctttcccctccttcaatcaattgctcctctccttccttctcctgtcgctaaagctcctttcagtcgctagtaagttgaattctttaagcccagtatagttttcatcctgtttccattagaagcccagaggttcccacagtgtttcacttggttgctctgcctagaagagactgaagtatagacatcaactgccattgattcttgttgagctgggctgaaagattgactgaaagggaagtgagtgatgcttggttcccaaaagacaatagagagagtaaaagaagcaagctttcttggtggagagaaggactgtttcaaggaagtgataacattggatccaaatggactttctagccctaaatttgatgtgtcagtttcatccatttttgagtcattgaaaccgagataaagatgtgaagtttctagacccaattgttattaactttaggacctgggtttccctacctgaagcatggagggatgatacaatgatctccaagtttcctttcaacttgaaaattttatgaaaaagaatcacatatggccccccggctggttatattgctactgttatgttttctttaaaccaagtctcaaatccattcaatatgaggtagattagtaatgggaaccagaaactcgggagaggccaccctcatatacagggaatttactgtcttgcgctttgtgtttgtgtttatttttacagactccttggtgacggtcgattctagggaagtaacattgatataaatccaagtggagggagaagttttctccttcatgtccccttcccaaacaacctagcttagttcatcagcttctgttgacattatttataaatgctaatgaactcataagtgctaattaataactccatgtgctgctatttactagcaaatataggaatccaggtgcagtatagacctgtccccaaatacagtacatttcttcatctctgagccaagtagcatgtctgggatgactctgttccaatactgccgaagtcagtgccatacacacttaaaaaatacacccaggagctacacttaaactctcacaacagcatcatcttcttattacccacttagataagaaaccagggtcaagtccagctgtattagtcagggttctccagagaaacagaaccaataggatatatatatatagctctatagaatgagatttgttatgaggctgagaagtcccgcaatctgctgtctgcaagctggaggcacaagaaagctggtggtgcagttccattccaaacccaaaagcctgaaaaccgggggagccaatgatgtaagtcctggttcaagtctgaaggcctaaacaccaggagttccaatgtccaagctcaggagaatgtggatgtcacagctcatgcagaacaagggaattcaccattctgcctttttgttcgatctgatcacccaacagattgaatgatgtgcccacctgtgttggtaaggtggtgagggagtgagggagatttttgttttgttttgttttgtttttttcagacagggtctggctctgttgcccaggctggagtgcagtagtgcagtctcagctcactgcagccctgaacccctgggctcaaagaatcgtcccaccacagcttcccaagtagttgggactaccaacgtctgccactacgctcaagcaaatttattttattttctgtagacatggggtctttgtatattgctcaggctcgtcttaaacttctggcctcaagcaatcttccccccttggcctcctaaaatgctgggattataggcatgagccaccaccctcaacctgggagcacttctttactcagcctaccaatttaaatgctatgctcttccagaaacacacagataagcccagagataatgttttcccagccatctgggcatcccttaggccaatcaagttgacacatttggttaaccatcacaccagcaaatggcaagattaggttggactcccgatcttgagaatggaatgctccaagtcagtgaactcaccccagcctgatctggagcatatcaaggcattgtctccttgctacagagtgggacaggaatcccataggggcagtatggaatgctctgcaaggttggactaaagaaggtctgtggggctttaaggggcactggatgccagtgcctttgctctcttatgggtgtagctgcgtctgtctcctccaatggctggtaatctctggaaagccaggagctcagtctgtcaggagccaagcctccctacacatgtgccatattgatattgctgatggatgtgtggacttgtggtcttctttgggagaccttgaactttcttcagcaaacaaggagatgaggccagaccttggttctagtgatcatattacctggagtttatcaaacacgtatgatgtaccacttactatgtaccaacttagcatcaaattcccaaaacagtgctattttgtagttattatttatcactgttccatttgagcattttgtaagctgagacagaaggataatgtaacttggccaaggtcatacagctggtgagtagcaaagctggggtttgaactgcctggtcaccctgaatgaagcccctgtctagcccaccgccttgggtgcagctcccagtgtgactgcagactccagcaatggaggcctgtccctgcacaggtggctctgtgctgtcggcagccctgctccctgggcgtcttccttcctctctctttccaggacctgttttctctccagattgaggaattggatccaattccctttcccagctgcaatttgcctctgagcccccagaacccctcctgaattggaatcgccctttcccccagcagcgctctccagccctctcctttcctctcagggcccagctccatcccttaaaagcactgtctgggctacattttaaaagtcactgttaaataaacttaggacccaccccctcagagagagagccgtggttacaggggagcagagctgaaggcaaacacttgtatccttgtattagacccaggctggggagcagcacaagctatttcttttggatgcgcctcctaggagtggaggaacttttctttgtaaagaaagagaggatctttataaacctcggacttttttcaaggaggctttatgggtggcaaggataaagctatagaggcaggaaaaagagttgctaactatatgccagtacagcatactttttaagggtggggtgtgggaggaggtggggagcttcccctcagccgctctttccctggatgcaatgaactcatggtcctttgacacctctgccaccgctccatgggacagcctgaccccctccatctctgctcctcacactgggtggtgctggagggagagggacctgtggctgtgtctgccagtcccaaacgccagcagctgcacagtcctgctataattgctaatatctgtttcttctcctttccaggccttggaaagtgttccaggaatggactttctgcagtatgatgacctgcaaaagcagcccttccatttacatttcaaactccaagtcagccgtgtcaaagtttgaaccagaactgtggaggataatgggtcagatgcaattagcagcccagagaaccacacgttgcagtctgatttatttttttgcccatcagattccaagaatcctagtgcttaaaagcaactaaacaatcgctctattgtactgaaataaagcccggttaattcagaaatcaattgcaccaccaggtggggcacactctggccccaaacagatggggttgaaaactcccctcaaaatgcagtcttgttaaattaaaaacttgatccaggagtggaacaaatagggagccatgaatggaatggagtcaggtccactcaggcggattctttcttctcccactccttttcctttaaaaaagaaaaattccccatttcactttcatcagtgttagcatctatgcagaaacgcagccatccaccctttgcagttgaatgtgttactttaattagtctgaaaattaaagggcaactccgggccaatgtgaatgattatgaaaatacatgtgcatcccatgcaatcttctcatttaattaatagtcttgtaaactatatggctcactttaagtcagtcaagaggtataacaactccattttaaatatccacttaatacttaacaggatgtgaggaacacactatagcatacggtcccttctcaagtttcactgtctgaaatttttcaaagctgacccaagtcaacctgaaaaatgtttaacaccctgggcttgaacacaagaaactctgtgatgaacagacattcaattacattttttaaaagtgagaagcatttttgtaaaatagcgactctggaaactaattggcagccgcaaaacttgtgagcaaaggccaaatcttgtggggaacttttactacagtaacacgactcaaagaaaatgtgaataaaaggcatctttgtttcccagtcaaattagctgattaagaaataaaacatcttaacatgtttttaaatgtagaattaattatttatatgagaaaaattaatgcctggttatgtgaattctactctgtgtgtgaattgaatggggcagaaagagtaatccgtgtggatccatgtcttaggtcattaagcaaaactaaatattaagagctccggttatggaaaaaaaatcacattcaggtcacatgttgtgctccccattttgattttcaaagtccagattagttatggtctacattgaaaatgtgattcagaacaaggaaactgctttgtattggctgagtactgacagttgagtggaagaagaaaacacacagctatacaaagagcacagccaactcctgggagggaacacaggccttttgctccaaaggaacctgggaaagattcacagaaagaatttgaacaggccattctttatttcctaatggttgagtttggaactcatgaaaacaagacaacctaagttatgtgtcagactcagaaaagaagtgggcaggtgacctttgacatctcaggcccccatgtctcaacccaagcccttcgttcctgacctcttaacattccaatatcctgaagccaggctctccccaaaccagggctgcaaattatctctgccatgtggataaacattcactgggtcagtgtttttcaaggtgtggtcctgggaccacctgcatcagaattgcttgctgagctttcaaaaatataggtttctgggccccaggaattactgggtcagatagcagtggggcccaggagtgtgcattttcaacaaatctcctaggattctgtgaggatgtgaaagtttgagaatcactgcccccgtgtctacttagagatcacgagagtaactttcactaagtttctttaatgggtttcctttattgaaaggcatttacaaaaatgtctattaatccctcattaaataaaaaaaggtcctccagccattttcttcatttctcatggtatctcttaacagagggagtatagaaatgctttgtcctttaaaataagttcagtgagtacttgaaaagtcatttggcaagagatgagggatgagacaaagggggaagattaatgacgaacagaatcagagtccttgctaaaataaaaatggattcacacccaacttcttctgaagggtaagacatatggcagctcgtgtgggaagcgagcgtgtttagtagagagaggtcctgctgcagagctgtgtgacgcagggtacagcttcctcagccaaaaacagaacatcacatgctatgggaagacgaatcatccctcctatgtgatgagaggctgactttctaaagaaatttgagcaaacggttgcctgaatggctttaacaagtttctcagagtcaagatgatcaggtttgggcatttagaccttagttttgctctgatttttgggtttggcctgacagcacagcattttctgtgactgtctgtggaagctgctgatggtctaaatttccgcatttataaaatggaagaactgaaaggagga

SEQ ID NO: 326 - DNA, 25090 bp, Homo sapiens
  source 1..25090: mol_type = genomic DNA
aatttaagttcttcagaatgaagcataaaaatatttcacaaaaaattattgtgttaaaagtcaaatttatggctgatattaaaaatagtaataaagtccaagtgaatggttttatgcaaaggaaatccccattacacattttgaaccaaaatagctcaaagagagacatgtgtccaagctgaaaaaaaggtgatgatttattgtttgcttttgccatggattttatttgtggaataagaatgtattatcacaggggaaacatagaattttgcttaccaaacgttaaaaagaaagttgaactcttgtgctaaggtaaaggggtatagatatagaagaaagttttcctgcatgagtattttttttggccacattaaataagtatacttatttgtatttataagtgtttatttgggtgacagataaatagaattttaatggcaaacatcatactttgaagtcaagagtaaaactgatttctttgaattcatagaaacgaagtattggagtgggagttctgcttggacccatgtccaaattacatataatggatatgactagaagtttgttaggtgtactagacacgaaggtggatatatggagagagaactttgtaaaggcttcctgaagcccaatatgaacatctcatttcccttgatctatcttatcatccctcaacttatcttctcaaaaaacacatgacagtctggcatggcatataatacatttttgcatcgaacgggttgtaatgttgtgttatttgttgtctccaactttgaccgttaaaattagtttatgtcagaaatacacttcaaaacttttgaggattattttctttcatattataattgtttttaataagatgaaggttgtcctttgtgaaattttggaactgaaactgatcacaacttaaaacttgaaatcccaaattaaagtttatttccaggtttaaagtattttacttgaatttgtctgttgtaaagttaacaaaaaatattaatatgtaaaacactgagaaaatgatgtaattgaactagaggagttaaagtattatttcaaatatgtttcttcagcctgttacaaaattgggaaccaagtgaacatgaagtctagaactaacaaggtttaatacaaatatccttatggtcatggaagccttcatgtagtttatgtgacttgcataaaatcaaaggcagagaggcaaaaatttagtctcatagtgtattgattttaatatatatttaagttggtgcatatttcacccaaatacgtggataaattcaatatatttagaagtctatagaagtgtagttttttaaaaagtgtattttctacaacattgttgaggaatttgcatgcactgggaaaattttggttttgagaaattaattttatgaacagctaaagtggttggttgtgtttgagactaaaagcctgttggagaattagactaacaaagggtgaaggtgaagatcattagaggttttagaactggctgagatgggttgctggggttgtgtaactgtgcctagagggcggggttcctgtacattcctacttcaccagataacctgcccccaacaccacttcagcttctgccagacagatggaactctccagcatgaaaatctgcgcagccattccaacaagcagggtaggtgaaacttgaattaaaattctcccctctttatttttctacttaagtccagatcctggagatatggaaagaatagaggtcatctagattctctcttttgggcacacacgtctgcattcttcctaagagctacctacctgtaagagttaaaaggtgctagagatctttcccagttagtacttcatgctagattttcttttgcgtgcattttttttttttttttaagatttcttttctctataccaatcattccccttttctattctcccttcagggccctttcccctcaatcactagcagttaaaataacccacctcagattttggctcccaaaggcacccattccccaccctagcggtcagttctagggaccttatcctgaggatgtaggccaagggggctccaggctggcaaatagatgatgtattgttatgttttgtgcctcttgtctccctcccgatttctactgtgttttgtttttgtttttccccaccacctaaggctctgcctgaggttgtccgaaggatgccgaggaaaaggatatcaggactggaatggctcttacagcaagatccgtaagtgaaagtgcttttcagaggggaaggggtagggtagggaatatgtgtaactgactgctttggactgagttttaacgcctgactttggggtcctggccttaagtgttcatcttttcttagaaaatgttagcaggctcgctaccaacagacgtagctgaaaggatgcataatttttttccacgttgacagaaatcacggtgaatccccaggtcaaaaggatgtagacacggcaaaggaacatggagagaaaacgagaaaaaattatacggagaaggggtagtgggagactgaaataggtcctaaagtgtaaattaattcatttcgtggaaatatgatttctgagtcttatggttgctacaggaacttccgggacgttcttaacgctcaaagacaggtttattagctatccttatttcagttaaagctctttgctccagagccaagaacctgcttctctctaaagttcttctttggatcgcccttctctatttgcacactaacatagccaaccttccccagagctggccctccgcccccagctccttggcctgggtcacaccagggtcccggtcggatttagccgggctgctccgggtcgggtgaggcactgggtgcgtgtgggagtcttctcttctgtctcttcgaaagactagggaaatgaacaccgttctgggcttgactttgtccctgctgggaatatcccagttcctggctttggaaatctcaggcaaataattgattcttaatgcacacttaggagacgtcggtagtacgctcgagagcctctctgtcccagagtggctgagagcacgcgccagacacaggttggctcggcccgaagcgaatttgggactctcgtcgcggtgtcctattaattagcttttcccggcgcctcagggactccggggtgaagatggagaggtggcataatggcgggacttgaagtcgttgtggcagggacctggcagcgttgttttctcgggttttgaaccggtgtggagaagtaacttcagctgctgagttggggccgccctggctgcgcggtggcggaggaggagaggagaagcgctctcgggacattgcggcggcgatccccgcagagggtgaagccgggcgctgcgcagggagcagcaacatgagggcgctcttgcccaggacaagcagagctgtacgtttgggtagctcatattggctgatgccaagaaaagtgacttcagaaccttggctggcgcgcttccctaccttttccctttcttcttaatcttctgtgtgccaccacctccccccaaccttttttcccctcccaaagttgtttccttttgtttacccggtgcggtttcagatctcagcacttctcagctagtagataaaattatttgctctgtaatggacatctcttctcctctccacttgttaccccactcgcccttcgctttctaccccattttgcttctctctgcccaagcctgtggtccaaggtgcagggatctcacaggaaaacaggtagcctcggggtgggaattcccagagcactgaaggcgccggttgttggccagagggaggccgggactccggtgggcagagtaccccgcgagtgcggagattttcaggctgtaatcttcagtctgggaaaggcgatgggaaggaagggcgatgcagaatagaggtggtccacttctgactcccccctcacccgccctcccctgcaagtaagactcaatttctatgattcaacaccgccttcaccagctcctctatcaaaccttgaggtaggcagacattctgaaagtgttgtgatcagaaaaggcatttaaaatgataacaaataactcacaaattatgtttgtgagggtgggagggaaaataaaatgccccatgtttttttcgtggtctgttgcttagcacatgtaatctttttccctatcttcggtcctatcttccctatcttgcagaaaagccgctaggaggaaagcatgttggacatttacagatttgagattcgtgttggaaagagagggagtgtttaattaacaaacatatttgggtgttcattttcggcttaggttgaatttgcctactccgctggcactcccagaaactggagtcctcgctttcaactttattcctcctcatctcttcctattgtctcattctttgaatcaatgcgtttaaggtgaaaacgtatcttcctgcgtagacgtttttgattccgttgattgagcacgaagactaaaatctgtaatggggttatggagacttgtctctcagttctttcattttctcattgctctgaaatttaatgacctgatcattgttgtttgaagttaaattatctgttaaattagccctaaataataactgatgatattttccttttggattcggttgcccttgaattcttggccctggatgtgagagaagtctgagagagtgttttgtgatacaatattataaagacaatcaaaatcaatatttgtgtgccagtgatatcacataggaaaaaatccctttcaaagtagctgaatttcataaagaagacattcttttaaaggcttgtgcttgagaagcctggattcaagaatgaatgtaaataagcatctttgttgatgaagaaaaaatatgagcactgtattttcattactctccagaatctaaatattcaaactcatcacatactggtgcttgctaatctaaatcaattcggccttccagggatacatattctcaaaaagaaaatttaacttttagcaaaatctaaaacattgtttcagatgtgaatttctagaaatccaaagtatatttatttctttgagtcagatactagtttgttttgcaatcattatatgaaacaatattgaaacaatgcagtttttgttctccttgcttgcttcatggtgcttccatatacaagtataagtgtgagagcttccatagtgtactgaggaaatgacaacttatttttttttaacaaaaggcccaaagaatctttaaaccaaaatgtactacagtagttgaaaaagatctttaaaaataataagcactattgtgtgtttttcctattaaaatgtgctgaatgaataattagaggctgggataaaggttgaaaaattcagagcaagaattaggtggtaattttattatttgatacttttacaatttatataattaatgatgtcattttaaagtttggcaaagcttttgcagaaaaaacagtactcctcccatcccatcagaaatacactagaaggaataaagtacattcaggtagaactggcagaaagaattttttttccagtagtagtagtattagtggagttgaaaaatatacttttaattatacattgcaagctctgattgcaggttagaaaactaaaatcgatcattcctacatcaatagtgttgtctattactacattgatttgtgtttatttatgcagagactttcagttatttacttacatatttcagcatctgcctcttgattattatcgtaggttgcttttaatgaaagagcttatataggaagcgaaacacacttgacagatccattttaagtaaacctgatagtgaattatggcaacccaaggagattatgaaattacttattcatacttgctttttagcaattaggaatctgtttctgattaaaacctcatgctgcttgaaaacttccattcttttcttcatacattgtattgatgtgcttcaataaaatagaaaaagatgattttgtgatgtcagatataatagaatgaaactgctaaatgagcttggttgtctttttccattggcatgatgaagttaccctcataacaataagctggccattgggtttattaatgctgtttatgaaaaatcaagtagcaatcatttgaatatagacatgtgttttaaaacatctattaactctaaattatgccaggggtgcttaggctgaatgagacaatctggagttcttgagtatatagtttatatatatactcatattttgtattatttagcattatgtgtgattataacttacaaagatagacatttctcttgaactaatatctcacaggaatgttatatatcagaattcatttgaacaaataggaaaactaaagaccccgtaatgtgccttttataagcacagagcaacagtgggatatcgagatgcgttaatgtctgtgcctctcttatcaccattacaatatattgaaagataactttaaaattgagagaaaaaagtgacctaatttattgagggctatttaatgctcatgttataggacttttattgaagtctggaggagtaattcttccttgttaacagtgtggatacatttagcaaatactgttaacagccctattcttcatcttttgcgccaagcaaccacccccagtccgtgcaggaatataacaattttttttttttttagaacgatagggccttgggagatggaaaaggaattaatcttctcaccctggcgagttttcctgaaactacttatccttagcgtcagcgctgtaagaggtggagccgctcagtcccgcgggtggctgcagacagaaggtgggcgagtcctgggacttaaaaagttttgcagaaggttgaaaagaggagcagagggagagttttgagtttatttattttattttcctttttttttttttgtcttgtgccaagcccttgaagttaacgtagcgacgacgtggtccttgtaggaccaagcattcttggcattctgtcgagattgagattccagagcatcggatgaacgggacttatagctaaggcgtactcacccacccctcccttcgtctttttacgcacgcagcaactcgtcctcacgtgcataggggtagtggacagtgttgacttgaattgctgtccctcgttccaagcctttcctgtgaatgaacccgaaaacactcgacaggtcgtgaataatcgttttaatgagtgtgcaaagcgtgcgacggggtgcaccgagctgtcgggttaaacaaacaacttgtaccctgaccaaatccgattgttaaagtgcaaagtgatgtcagtaccatttccattgcctttcggaaatccacagatctgacacgcgggagtccaattttccccattaaagaaaaataacaatatttttcgaccgtgtatgtgatcttctttaatattaatctgagccaaacaaaacctcatttggagaatcagagaattagtcgtgtctctctcaaagaacaaattggaagaaaggaataaggagaaagaaatcagaacaaatataaaatgtctgagggataatttcttcttgatagctcacatatcactgctgatcaatgttgtaaaaatcttccttttatatattgctttatagctcactaaaggcagatgtcaggttacttgtatccaaacaactggactggtaatttagtcttgtactaagatggaatttgtagacctgtaagggctttttctatcaaatatttaacgaaaatatttgttgtttgtatattagcctgtgagagaataaaggtataagtcgtttgcacatttgtgctttcaaagaaaagagtttggaggaaagtaatggaaaaggaaccctatttggctattatctaaaatcataacaaaaaaatacaaatgagattttcactgattataccctccccctttttttgcaaaactacactggaaaatattttctttctcattcagtaagaagacttatttgaaatcagtcacatgttctcccttcctttttgattcttttatcttctttcataattccaaatattaaatatcacatgaagattatgaaaaaaacttcaaaagatttttataaaatcttttacacattccctctaaaaaatctgtggaaagaagaaatgtgtaaaatatttcccctaccagcattttttatatattcacaattcaaacaaaatggccatgatgcttggaaatcagtattctagtgccacagatctagcttcttcaactcagtaacaacatagggagaccaaagcttatatttttgttggattaagtattatatagtacatattttctatatgaaagacagaaaatatatgattccctgcaatctgcaaggttatttgttctcttttaattgtaatccatttggagaaatgaaattttagggatatagtacacttgaatgtggaagctcagcatttactcacttaactcctattggccataatgttatctacatatctgtgtctgtctgttgtgaccatctacttcacatacaaatatgtctatatacaactgatagcaattaagagagttaattcaactaaaacatacagctgaggtatttgaaagagtaagcaattttttatgtaagtcattgtagttatgttattgtggttgctagtttttatacatctgtcaatttagcaccaattggataaaatggaagagattgaaattcaatttccatcatcaaaacttggaaaagacaaccagggttttaggacagtgtttttgtttattttaactgttctctagtaaatatccgtatcagattatcaattcagaatatcctttattttgtaggaaatttaacagaaaaattagtattaaatcctaggggcttacaatttttaattgttttaaatatttttgggtaggcaacagactgtgcagtttttacctaaacagatttcttctctgtggactggagttgaggaatttcaggagtcactcaaagaactgcatccatttctgctttagatacacaaacagcaaagctagagggtatgtctgtttttgtgtgtatatatgtagttaaagaactatgctatcaaaacattaattatatttgaaagagaacagagcatgttgtgaagaaaattgcaatattgaatttatattccacagaatctgtctgagagggctgaaattgtatacctgtcttatatgatgcaccctcttcagagaggtgcctaacaagagcaaagagatgaaagagtcaaacttggaggggagtgatcttaaatgtttggttggtcctgagcagcgggaatccacatgaaaatgcaaaccacatgaagaacatacatgggatctttgttccctgtcaacaaaaacaaatagaatttttttttcctctaccaagcaaatacagaataatcttagctgaatttgggggagggggagtgactgaatgactaagaaaatttcagttatcatatttttttatccccaagtcctatttatttcacagctgccaaattttatgtccaaaatttaggttcttttcctcccaaatcctacattagtatgaatcatccctgatcatttttagtttttggcttaattactagttttcagctttaaattaccaataaactaattaatctgactaatctttctaaacttctgttgaatagtataatagctgcaacaacaacaaaaataaataacaaaaattacaataatgacaaaaataaactgttaataataataatgcaaataatagcagaaacaattttaaaataatttatctggctgacaggatgaagatgtaatccatttcagtctgaaatttgtggttcacagctgcagtcaggcatttctctgatttcttgtttcactggttaaatggatgatctattccaacccaagtttcctaatagagactcccttggtctaatatggtatgtctttttaatggcactgagtatttttgtatccactcccctttattgctatggacatgctgccctgcagatgacattcccaaataaaccaaccttggcggggggcggggacgggaaactgggtgcggaggcagacatgtgaaaggattcttgggtagaaggaccaggtgccttctgactggagccctgctggtgagtgggcaagttgtcctatttgggaagcaagttcacagagctgaggagtttgagaagggctgagtcactgaggttcctgtgagtccaaagtgatcactggccctaaggaagccagcccatagggcaagacataagaagtaggaattagatcccccagatgaactcttttgattcctttagggatagagagacataaagaggataatgaagtgaaggcagtatacctggagggaagacagcaggttaaagatgttagtaactggtgttggtctggcaagtaaatctcagcccatttcttcaggagaagggaaaaatgcttttgtgagctgtaaacttgccaaggtttattgtttaggtgaaagaacagccatcagttcctaggactaggcttgaaagtatctgccagcgagtctgtgtctgcagtaatccaactctcctctcagccccatgttcttctcatctcatgaacccccaggcaccattatccccccaaaaagaaaatgaacgaaaattaaaaaatggattgggagggaattagactcaatatttatcaggaagatactgaggtgaaagcaggttgttttataactaacttccttcttttgtgagagggaaaagaaagctggttaggagaggaagggtgattatgaaagagaacagagactgagacagaaattctttggcagtccagcagctaaggccaaagggagaaggatcttagctatagaaggacaattttaggtcaaggaagagtaaccattgaacatattttctttgttctgtttacttgaaaagtaatatagcctagtaatgtatgtaaaagcaagatctgtacaccttaaaaattataaagagaaaggcataaatatcaaaagcaagtgttatcctttagaaaattttaatgaagatattgtcttcaaacttatatatacacactatcccaaaaccaaacagtagttgaaggaagaaaggggggtgagggggaaaggatacaacttccctgctgtagtaccatgcatctgtcttttcacctttcacggcagggaggctgaacaatcctctttcatttcatttcttcctagtcttttcattgttaaaagtatgagaaaaattccagctcatgagaatattatttcactaaagatcagcaaagaatgaggagctttcatgataaattctctgaggtgatgttcagtcttatctcgcctaagtctgcaatgggagaaatgcagctctggctgtaactatgtatcaatctattcttcaatgatacccccaggctttctcactgcactaatcataactactaaattcactccaactcttctggaagtacagttctgcagcttgaaatcaaacaggagctttccatataaaatgaaattctaattaaaatagtattttaagaaaaatactgttattatgatagtttcatctttgtttgaattgttcctttgattaagaaacaaacatttgtttcaataagaaaatgaaaagaaatcagcactgccagtaaatgtggccttcaatcctgttacatttactcccgactggcttttgagaatttattttccaacattttggttttaatagtatataactgagaacctccaactcaacagaaaaatgcataactaaaatagtgtaatacttttgtcatgacagaaaaagaaacaataaaagcagttatttcaaagtagtaagtcatgcagacactattacacatgcagagtttatggacccatttaacaaaattaatatgcttctatatcccagtatcttaatgactgtttagctaaccagatacttaaaccatatatttaaatgcttatgcacctatattacatataccatgctgcatatggttcaaatatgtatgttctttacagaaactgaaagctgaacaaatagtagtatttctaagtttttgattactcataattgggatttacatgcgatctataaacactgaaggaaagccagaaccactacattttgcttagattacattatgaatcaaataaagggttctttctgtcttggggtgtgcaagagtgaggaatttaggggttgatagaattaagatatatatttttttttccgtaagtcaagatgcagtaattttcttcttctaacattctactactaagtaaaataaacatatacagtttcaaaagcaggagccgtaagcccaagtcaagagatgatatttcagaaaagatattcaaatgaagctcaataacattttttccaacaaagaaaatttcaaggcagatacagccagatctgttgcacaagtggcaaagcaaaatattttagtaatgggctgtagggggatttaatggactgacactctgaatatttaagagtaatattcctttgaagagaattgcatgatcgtctatcaagctccttaaaaggggtgagggaaggaaaggtttggagggtggattatgtccaagcatctcagctattgctagtggtgaaaagatatgacctgggtagaatgggaaaggttttgatgacatgagaggatctgcaagagtctattggccctatcatgtttattctcttttaggtacacatttcaaaaacatatcctttccaacaggctctcgtttgcagtcgcggcttcacagacaacaaccagcttgcattcaactgtggtccaatgcatcagtctagttttaagaggaaaacaatggacaggaaaaataaagttgcagtcttatcaatgaaattcttattctcagttggagaatagggaaaagggaggctccaaaacagggtgatgggaggggaataataactctttaggtgagttttgggaaaatgctaagtaaaatgctgttcagaaattgggattaatcgagcagtttaaatacaaatctgccggaaattggaaatcgtgctctgtgcgaatgaaaatgaaagactttatgcatattctaattttctctctttggctgctattttagaggaagagacttcttttgctgatggtgggacttttttgttctgcacaggaaatgtgtaaatgaacacaaatgttttttcttttgcctttccattcctctcttccattctcccctccccctttcaacaatctgaagttgttagggtccgcagttctgccgccaccgatcccagtgttacttcccattcccaggatgttagagggcaggcaatgtaggcaggacaggacagttagggctcctccggaaattagacctttggaaatcaatgcagagtttctattacatttctggacattcagagagctagaggatgagaaagactcttggttgaatatgatgaaaaatcatctagatgaaaaatcgtctagaaagtcatttcctctcaaaccgaattctcagtgacagctaggtggaagagagcttaaaagtgattttataaaccacgctgtgaaaacctactgacgatcagtcccctgtccaaacacttttcctcccactcctttgggaacatacagggatggtgcattttaattacattaaaaccagcaagaaactcttgttttattctgatgtaaatcagtcacctaatgctgagaaggactgaagtggctcatatggtcgttctgtgttttgtagaatacgtaggggactcctgaaatgtgtgggatgtaggtaggggcgggagcgactctgtggggagagaagggagaaaaagattgagagaaggaaagagaagtgtatttgcaaggcaggctgacaatttctcaattaatttggggcagagacagaaagactccgagtttctagcttcttttctatacctcagataaaaaactgaagacagccttattctaacaactcaatttaaaaagagcccccctgcgtacgtccccgcacccctttcgccccagcggccgctcacaaagcgccacccgcgcctcgggcgcccgcagaagccggagccagttctcagccctgatcgccgccagccgcccaggcttcggggaaggagggaggggagaataatgcgcccctctttcaataaacgccactgccaaccactccaacagacacactttcggtcccccgccagagctccggtgcccccgagtgaccgctttctgcgatcgcgtccgccgggaccccgtccctctttccccttcagtcttcagggagggggaggcgctccgcattagcggggcagttcagcaaccccgaccccacccgcgtggctccaggcccaggggtccgttcacttccccgtccggtttgggggacgccaattcgcctaagaaaaccctggcagaagagcgcggacccttcactacaaacctcacgtcagggttacagccacatttaggaacctcttcggaaaagctgagaaatcactgttttgcaaaaagccttctgtactgtgatggggctttgtggtgagaggaacctctgagaagcctcgtgcggcttgagtttagagtcacgccctgcccagcgacattctcccgcgcacgggagaacctgcacttccggtctccaaccctcgcgggccgtgactcttcccctcccccgcgccgggccctgcatttccggcccccttgctctcctgcacttccgcccagtcacatggatgatggatagcgttgggagctgttttctctatcttccaggtggctgctgggatcctaaacttgtttctttaatttctctttaaaaattgaatgtcctttagtttttttcacttccttaaatttgagggtcgagaaagctagaggtggagacaaaaggctcattgaagacaaatcttttttggcttttcagatcacttacccctttctgaattccctgtacaaattcataccagtaactgagatttaggcctccagggcctaggccagtgtctgcacttagtaggcacgcaatacatgttgaaagaattactggataaatgatattctgtctttaggcatatcatgcctagggttaatgggtatcttcaaatcaggtgacttctgtttttggctgaatttagttgaaaagttgataaatacatggtttttacaggcacttaagtgttatttatttagggactccccaaaacaggtgtgggggaaaatcaccacaaattgttggaaaaatatatatatagggtttttttgttgttttttgtttgtttgtttgttttttctgatacatggtcttgccctgttgcccaggctggaattcagtggcgtgatctcagctcactgcaacctctgcctatccggctcaagcagttctcctgcctcagcctcccaagtagctgggattacaggcgcccgccaccatgcccagctaattttttgtcagaggggttctcaccatgttgcccaggctggtctggaattcctgacctcgggtgatacgcccactggacctcccaacgttttgggattacaggcctgagccaccgcacctgtgctgaaaatattttcttggacttctttctacatatgaggtaaagtgctgtgatttttaggtttttgagttttatcaactctcacccaggctggagtgcagtggtgccatcttggcatactgcaaccaacctccgcctcccgggttcaagcgattctcctgcctcagcctcctgagtagctgggattatatgtgtgcacaaccacgcctggctgatttttgtgtttttggtaaaaacgggcttttgccattttggccgggctggttttgaactcctgacctcaagtgatcctcccgcctcagcctcccaaactgctgagattgcaggcatgagccactgtgcccagcattttgctttcttttaaaacagctttatttgataagaggtcaagaccttatgaaatgaatttaaattcttgtagtgaatttgaggcagaaacgacgactcctcttttatttttcctgctgctgtattatagtttaattcacttccgtgttgtcttctgcctcattcggcagttcttgttctctataataacttttatgtttaaatgccaaaagaattttttttgtaaccagttaagagttgtgaagttgtgagactgaattcagttgctcatcatgttttaaatgcatatctactcagcactggttgtgtaatccacagtctgttccctagagcatttaatgacccacgttcattgactgtaaaatactcaaaatatataaccagtgagctagtaatcatgacagtgatttgaaatgttatagttgcaagtcaatataaagcatatttattagcatcattattaagaggtgtcagagggatacaaataagacctgctcctaccctctgggaacttacaatctggttgggcaaaataatgaaatgtaaattgatagaaacagctactaacccatattcggtgtctggcatattgaaggcattcagtaaataattacctcacaataattgcagtcctgtcattcttatagtagaatatgatattgataagaagtaaaggaaggaataattagtaaaactttaggaaatgaatttgtcctgtatatgtcacacgtggagattggaatatgcaagttgattgtgtgtaagaagaataaagggggcataaataaagatgagaaagacgtttgatgagatggagtttggtggtaaattgaaggaaaacttaaagaccattcagaggagtttctatttgatagtagaggtaataaagacccatggtggccctacgagcagaggatgacattactaaaattgagttttattttaaaaatgattctaggctgggcgctgtggctcatgcctgtaatcccagcaatttgggagtccgaggtgggcggatcacctaaggttaggagttcgagaccagcctggccaacatggcgaaaccctgtctctactaaacatacaaaaattagccaggtgcggtggcatgagcctgtaatcccagctacccaggaggctgaggcaggagaatagctggaaccggggaggcagcggctaccagtgtatctgagattgtgccactgacctccagcctgggcgacagagcaagactgtctcaataagataaataaataaataaataaagattctagccagcaactgaatatagggaaaattgcaggagaaaagattagtgcagttctggaatgtggtactgttagagaatggctatagtcagagctatcattacgtcccttctcctcaatttttatacaattgaaattgcattgaaatgatgaaatcaggaatgaatcttgcatagaacaaaagccagagtaccactggaatcagtactacccccttattcttcattattgatagtgacaggggatgttagacattgagagaaggcaactaaccccaaaatattttcatcaccagttaagctctagatattttttttttttttttgcatttagcatatccacccattatgcaattgcagtggttctcaactggggtgatttttgtccctttcctcccctgggagacttttcacaatgtctggagacattttttagttacagcacctctggggccactactgacgtctggtagatagatgaccagtgtattgctgaacatgttaaattcacaggatggacccccataaccacagactactatgtccaaaatgtcagtcattctgagcttggaaaaccctcagttatgggaatgaagcatgagctccaactctggagagctgcaccatgagtcccaggtcttaacttctattatggcaacaatttcaatcgaagaaatgttttgcttagtgagacaaatataactgaatatcccagtaactttgcctacccctgaggccttagagacaagaaaatcagaagggtacctgcttggattttctactttttataaaataaagttagaaatcttcttaaggatttgtcttcatctaaatgttatttattaaattaataaaatgtgcctttggagttgcttagcaacttatggaaagcttgctttttagaagttcatttgtttgtttaaaacctggataggttgcatattattagccacattacataaatcaacaaagaaatgtacactgaaaatggaataagatgtttcaacacattttcttctctcctgtctggcaattaaaacactctaattgtctggtagaattgcatcaagtattcgacaaacattatttatgtatgaaacttcaacataatattgagtatgtaagagaaccaaaggggaaaaattaaacaggtttgtcataaagtatgtgtttatcttaacctttcttcttcaaaaaccttatctactaagtagttttatcagacactaattatacgctttctgaatagaatttctccaacacccttcagtgcctgcaccctttaatcatatctcattacatctacctaatccatatctttttcgcattgccagggctcattaacagttttaaaagccaatcttggacattatcactccttgtaatcgaaatgaaaataatgccaataatgttgtatttctaaaataaaatggattatttaaattttgttctgaagccatttcttctttaaatattaatgagaaattaactttcaaacatgcattaagctagcaggactggtaagatgtgtctgaaaaccctgaagcaccttttcaaagaagttatttttataagctgttttaacagtggatcatcagtcactttgaagggaagtgatccttgattaacagttggctgatattgtgtttccacagatgtgtggcagcaatacaggtgctatgcatgaaatagtacaggtaattcacaggataaatgcattttctttttctgatggaaaaagatgaaatgcttcttcgtctttatatactgcccccatttaatagttattgacaagacaaaccaaatgtgtcactgaaataatgaactacaggcactgcgtttcccataaatttaaagaaatcattgtcaatttggctagtactttattccttttgatttcctgtttttaaaaaagaaaactcttacaaatctgcagttacatgactaaagtagagcatcatgataatgactttttgggacttgaaagtcaaatcttgtctctcagaatataattacataggactaacaagttattctctaaaatggaagcttcctccaccattataatcaagcttcagattctttcttgaaagtaatcaggaaaagtttactggcccattatttatttatttatttattatgcacatactattaagttacagagttcaaaacaaccactaaccaaaagtcattgtccaaaagtacagttttttgaggtggtgtgcacctgtgatcccagctactgcagaggctgaggtaggaggatcacttgagccctggaagtcaaggctgcaatgagctatgattgtgccactccactccagtctaggcaacagaaagagatcctgtctcaaaaaaaaaaaaaaaaaaagtacagtttttagacaagtatcccaagctattgttcattagtagtggagacataataaagttttcattcttctttgagttattttcccactcattagtttagccagatagcagtgatctcttattttaagtgttttgtcagctgtttcttccagtttttctttggagtatatgtattttttcttttagaattttgtgtttcttctgatttctctccattaatatggctcatcttgttgctgactacagaaactttttaagcagaatcaaatgaaaccatatagttgctgagtttggtttgtattgtcatatcttttatagttgtaccattgctaataatcaaatacagtaatacaattagatgtgtagaatctgtaagattttttttttccaagacttccttggaattttctcttttaaattccttttatttatttgtttattttttttttagatggagtctcgctctgtcacccatgctattgtgcggtggcatgatcttggctcactgcaacctctacctcctgggctcaagcgattctcctgcctcagcctcccgagtagctgcaattacaggcacctgccatcatgcctggctactgtgtgtgtgtgtgtgtgtgtgtgtgtgtgtgtgtgtgtgtgtttgtgtatttttgtagagatggtgtttcaccatgttggccaggctggtctcgaactcctgacctcaggtgatccacctgtctcagcctctcaaagtactgtgagccactgcatctggctccttttatttatttaatcatatttttgtgtgtgtgtgggataacattgcacctgctcggttatgcacaagtaatttacctttctttgctttactgaaatagcttgagtattcagaccttaccaaatttttatggtgacatgatagacaatacttatttaaataaaatttctttcattttattatcaattaaattaactctataataaaaaataaaacttggtgaacttaacaacatagcaaatcaccataacaattttaaaattgcaaacgtggtattaatataccttaaaattgttcttgctttggtaatcaggtttttatctttatttctcttattaagaaattttgccttttctatactgataatctttttccttgtccttttcatgttgttattttcagaggtttttcattagtcaatacagtgaaggctggcatgatcatcagcttcccatccaataatatctactcatcagtgtgctgttgtcaatcagagattttcaagtatgagttctccaactcaaagaaaagtagctggatccaggaagaaaggcatttggggaagaacaacgttctttacagtgctcatgatgtgtctccagagaaagttacttcagcactaaaaaaaacaaacaaacaaacaacaacaataaacaactttcctctacagtatcttccagggtctaaactattagacaggttcctaagtttatccagatctctcctatgtctgaattcttggtcatcttccttgcctctggctccacaggtaaagaagaaataataataaaggaacaaaaattatatgtttcaggccgggcgcggtggctcacgcctgtaatcccagcactttgggaggccgaggcgggtggatcatgaggtcaggagatcgagaccatcctggctaacaaggtgaaaccccgtctctactaaaaatacaaaaaattagccgggcgcggtggcgggcgcctgtagtcccagctactcgggaggctgaggcaggagaatggcgtgaacccgggaagcggagcttgcagtgagccgagattgcgccactgcagtccgcagtccggcctgggcgacagagcgagactccgtctcaaaaaaaaaaaaaaaaaaaattatatgtttctgtcgggctgactcattccacttttgaagcacccagtggattaattagtcttattattgcatttactgtcacctacacatttgtttgtgggaaggcactcctcttggcatttgcttagttggaaaaaggaacactaagactatagccactggataatgttcttgaagttcacggcactgtggcagcataaagcttgaacagacctagtttttttattgatggagtgcaactgatgtagcaccacttttctctgacactgtatattagcttttagttatgaactacttccttccagtgcagcagttgttgcctaccattggtaccagtttggcaccattataaagaaacattgtacctcttataggaagaatttggagagttttggtatggtaatcaagatgtgtattgtaataattaactgaattctgtgaacacactgtttctaccttaagtgaaagaaaaagagaacagctgcaattatttatcttcactcatttctcatagatagccaggatttttcagtgtacattctcttgtcctgaaattattttcagttcttgttgattcttatagattataatgagaaaggcacgagcaagaaatttgaaataaagaacacaaaatgagattgccctttggttgttaaaattgcagatttaacaaaatagatcagcaaaatatgtgcaaagttatcttaacagattaattcctatccagcaggctttaacaaaaactaatagaagctattacatatttacagaaaaaaaaatttagccatgaaagctactaaagaaaagccagaaacagcgtaagaattccctactcaaatatgattcagagacgagggtggggactttattccactggacttcagtcccagtgacaaggccactactattgtgaattaatatcaggctaattaaacttgatgttattaaatgttctatccataaaatttttcattcagaattcttgtttttcaaacaacattctggattattatttagctgtcaaagtagctgtgttcttagaaaatacatcagtcagggctgggtacagtggctcatgtctgtaatcctagtgctttgggaggccaagacaggaggatcacatgaggccaggagtttgagaccaactaagtcaacatggtaggaccctgtctctatccccctctaccccccaaaaaattagtcagacatggtagcacatgcttgtagtcctagctacttgggaggctgaggtgggaggatctcttgagcccaagagttcaaggtagcagtgagctgattgcactactgcactctggctcatgcaagataggaagaccctgtctcagaaaagattaaaagaaaataaactaatcacacaaatttcaaatatactatttataatggtagaaacattttagtgagcaatgatcctggcctttagtgaggtttttctcataacaatttgtcataaatgaataatttctgggtaaaacattataatttcattttttctttatttatttatttttatttttatttttgaaacagaatctcattttgttgtccaggctggagtgtccgcctcccaggctccagtgatcctccagcctcagcctcttgagtagctgggactacaggcatgctccaccacgctcggctaatttttgtattttttgttgagaaggggttgtgccatggtgtccaggcttgacttgaactcctgggctcaaacaatcagcctgctttggcctcccaaagtgctagaactacaggcatgagccatggagcccaacctgtgatttctttgctgtgtacccccatttgatggataattttttggcatgttgataaacgtcagggtgtaaagtatccagtatgaggggtaaagccaggattataataaatttgtcaacttcaggttttcttgctagccttttctgtgatatacaaagtgcacatacaactacatgggtaggagaattgttgaaataagttatcattgttcaaacaataatttgttggaaccaaatatcacccacaatgcaattgtctacctttaaagaatggccatagagtcaaaaactttcttttgaatcctggattcactatttatttgatgtgagatcacctttacttttataccatcaatttcctcagtgtaaagagtgtattattaaaattccctcgtacggtcacttcaaaattaaaataaataattcacataaatgcttagcactgtgcccagagtatggacatgaatgtaaaataatgcctcgacattttatcactaagagtaataatattattatcataataagatgatgttgattcaggatatgatttgggcagcaaaattttcacagggaccaattgcagaatactcgagatcatatagtttctagaaattatttccactctaatatttagatagattacggtcccgccattgccgtcctctgaagtatcagatcttatatttattttttgtaattctttatcatttataatatttgaggaataaattaatgaatgaataatcttctagactctcccaaatctctctcaatggcttaatactatcaagacttattattccctcatatcacattccagtgcaagttgggtgaagagtggggtgaatctgtttcattgagtcccatttagtcattcaggaaccctggaagtgactctgccattctttagggctttggagtcttccaaaggatacacaacattgggtaaggagggaagaaagcttattggagagccagcaggataattccttaatcccattaacttgaagtcaaccacatggcccaacctaattgcaggggaggtgtgggaatataatttagctgtgtattttggaggaaaaagaaatgggctggcacagtagctcacgcctgtaatcccagcactttgagaggcaaagatgggaggataccttgcatccaagagtttgaaaccagcctgagcaacatagtgggaccatgtgtctacaaaaaataaaaattaaaaaactagccagacgtggtgacatgcgcctgtagacccaactactcaggaggttgaggcgagaaaattgcttgagcacgggaggttaaggctgcagtgagccatgatggtgccactgcacttcagcctgggtgacagagtgagatcctatctgaaggaaaaaaaaaatgggtttgctgaccacacagcattacttctgccctactaattaaccaaacactgccactaacaaaattagttttacgattcttctataaattttcagttacctaaagatggtgaggaactcttgcctaggaaattaatttgcacatagttttatagaacaatatatcttatattagaaagtctttgtcaacaaggattggaaagtatcaccttttgataagtctttgttctataggaattctctggataactttttgtgaagcatttatcctacctcatttctacttaaagctcgtatatatgacagagattatatccttaaatgagcatttccttgcttttatcatcttgtgtcattatcccaacattcttttattatagttgttattgagagcatactttcagatttagcatagagattaactgtgaaataagtaaatagtgaattgtttagttggaatgaagtataaaagtcaatgcttttaagaggttttttttcaattttaactgct

SEQ ID NO: 327 - DNA, 78688 bp, Homo sapiens
  source 1..78688: mol_type = genomic DNA
cctggcttgggtgggagactgggccaccctggcctatggcacgaggtggagcggcccgtcgggcccttctgtgtgacctgggaagggccgcataccctccctgttctccaggctccgccccaggaggagccacagcgatggggcagtgtgcgcagccccgggaggggagtgggagctgcacgtgtgtggggcggatgtgctgtctggaaggttctgggaacgcagcagtgaccggcctgtccggtggttccctgccaggtgcggggtgtgaggagacagatgcatggataagtctccgtgggaaactcaggcctttgtcctggcggaggggaatgggtctgaggcagcctctgccgggctggcggcctgtctggctgcgcgtcctgcagcaccggcctcacccccagcacacgcccgccaggagcgcaggggccccgaggatggaagcgtctgtctgaggcgctgtcctgggaccccaccccgccttcggggctgatgcacagaccgggaattgaggatacctggtgtggaggaggccgctgtgtttgggcctgggtctgaagggtgagtgggtgtcattgtggccacgggccggggtcgggggagcattcaggtggccggaggaggcctggcacagggaagggcagtgaggggcccgggtggggccaggagatagaggggcgggaccaggcctgtgggacagtttgaatcacgcggggagtttggtctttatgggaagaaaggcgccgtggccattcggagagccactctggcactgctgccggtgcggtccggggctgcggggcctcctcctgggcctgaactgcagggctggtgggggccatgggggaaggtggctccacaggtccccggagctgggggagcaggaggatggggttgaccaggagggaaagctatggagctggagaatgcaggaggcccccgaggggaggtgcagccagcgctggtggggaggcctctgaggggtacgcggtaattgacatcacgggtgtgggtgagagtggctttcaaagcatcggctggagcagggtccccattaaagccagagacgctgacgccatggggctggggttggggctgggccggggctttgggaggtccgaactccccagcagggagccagggctctgggccagttcccaggcccagttaatcttcagtagaatcgatcgaccttggctcagagggttggaggcagggatgggcagggggtgaggggtgaggcgcacgaaacagcacccgggtgaggcccctgctgcggcccctgcgggaccagccacgaattccgggcttcagccccgccagcttcagaggcggcgttttcggtgcgacgctgccacctgctggctgtctgggagttgcacccagaggctcagaacccgtgtttctcagagggcccgggaggggcgaaactgcgggttcccaggccctcccggattctgcgcaggtggacgctgggggctgtttcacaggcgcccacatgataggggagctggaggaacctgccgtctccgccatcgagcgcccctccgagctggggttggacgctgccagtttgcacagcagcaggtgagcctggggggttgagggctgagcgggggtcccagccgatgaagcagccccgcaccttggccagcttctcgaacctcctctgggcagaggctgtggaggctgcgaagcggcggaggcgttgaccaggccagctgctcagcctttctggcctcagtttccacagctgtaaagtggggtctgtccacaacacgtgtggtctagcgacggccctgcggagtgggtctgtaactgcggactcacttgtcccgggctgttctgaaccggtggttcccccgccctcccaggagacagcacctgtggccggcagccgcccctgcagcggcccctggctcccaccgcgccctggccctgggggtgcccaaagaccggggtgtgctgtggcccgagtgagcaccctgtgggcgtcactgctgtccatgctgctgggattggggaagggaggtctggtggggcacagtgggcgcaccaggaggtcaggctgggtggggggagcgggagggagcccccgctgggtggtcttgggccagccagcttcttgcctgcagggcaatggtgctagtaactggaacaacccaccctgcctctcccagagacggcgcctcctcagtgctccccttccacaggacgtagggtcttctagagatcaaaacagggaggaggaaagaaatcctaccgcaggcccctgccccgaccctgggacccacactgtttggcttctagggacaacgcccaggccctgggatttgaagactccaccttttctttcgtgtgtatatgtgctctgtcaaaatgtgtatcacatgaagttgatcgttgtgaccattttcaggtgcacagcccaggggcattgtacacaaccgcggtgttgtgcagccgacgcccccatccaactccagaatgtttgtatcttcccaaactgaaactctgtccccagtaaccccggctcccctcctcccccacccgctggaaaccacgactccgccgcccacctctgcatttgactgctccaagtacctcaggaaatgacctcatgcggtctccgcacgttcgcgtccatcttgtttatttccagcgtttggcccgtgggagcgatgagcgcacctgttcagcccctgctttcagttctttcagggagttctcacgtggtcttcagaggttcccacacgctgcttcccacagcagctgcaccattgtacattccaacagcaacggacaagggctccaatctcttcgtattcttgcaaacatttactattttatgtggtttttttttcttttctttttttttttttttttttgagacggagtctcgctctgtcgcccaggctggagtgcagtggtgcgatctcggctcactgcaagctccacctcccgggttcccgccattctcctgcctcagccgcccgagtagctgggactacaggcgcccgctaccacgcccggctaattttttgtatttttattagagacggggtttcaccgtattagccaggatggtctcgatctcctgacctcgtgatccacccgcctcggcctcccaaagtgctgggattacaggcgtgcgctactgcccggtttgaaaaggcaattgaggtttctaaactcctactaaaggaaataattcctagagttgggctgcctaagagcttacagagcgataatggctcacctttcacagcgacagttacccgaaacacatcttcagccctaggaattcagtgccgccttgactcggcacggaggccacagtctttggggaaagtagaaagagctaatcaaactctaaaaaggactcttgctaaactatgccaagagacatcagaaacctggaggtctttattacctgtagccttattacgggttcgaatggcccctaagggaaatctgcatctcagcacttttgaaataatgtatagaaggcctttcttaactacagacctcctaatagacatagatactttcaagctacagaattatgtgatcaacttaggacaagtgcaaaacgcactccttgactatggaaatcagagactcccttcccccactgaggaagacaatctggttccaacccagctgggagactgggtcctattgcaaacttggaaggaaggatcctcagcagatcaactttccccccaagtggaggggactctatcaagttctccttagtaccccaactacagttaaacttctgggaataaacagctgggtccacttatctcaaattaaacctgtctcttataaagccccacaggccaacggaacacaagagactgatcccgtttattcccgtgagccagtcagtgacctctgattcctgttcctaagaaatgagagggatggggggcataaatacctggattggcattctacttttaggcacaagttggaatcatgcagagagtgatttatttactgagtaggcacagactttagcctgtctacataatcacataaacggttgggtatgtggagaattgccactttcctccacctctgggttgccctggcatagtcaactggccagcctaagtctgtggggattttacgttccagaccattacccaggctatgagagctttagagctcacgtctctgccattgatgagctgtcagtcagtcctctattggcttggttccaacagctgcccagttcttggaaagcctttctgtttagctagtttacttggaatgattttatttattttgctttgctattgtagaatatattgcggttgtactctttgtgtaggaatgcatgacaagctcactcaacactttcttcagttggacatttttttgttttttttttgtttttttttgagacggagtctttctctgtagcccaggctggagtgcagtggcatgatcttggctcactgcaacctccaccttctgggttcaagtgattctcctgcctcagcctcttgagtagctgggattacaggcgcacaccaccatgcctagctaattttgtatttttagtagagacggggtttctccatgttggtcaggctggtcttgaactcctgacctcagatgatccacccgcctcagccttccaaagtgctgggattacaggtgtgaaccaccatgcccatcctgtttttccttcttaaatgagacaagagggatagagaatggggctgtgtgtttcccttcccaacataaaagactggagggagctggagttgatacttcccttcctccaggttggttagactctgattaaactctggtacgttaaaaatagtttctcttgagggcagaggaagaacagaatgctctggcatatttcgaaagtgctacttctcccctccccttgtccaaagcacaaggggatttttctctggtatttacctgggggatctggtagagtttgtgcaggtaaaactcacagaagtgtggcctccaccctaagactgggccctggagtttttaactgtcaagcttggccacacagcctccagcaatctgccagtgacagtttaggttttcccaacctggcagtggttcccagggaggtgtctgctctgcagaattgggattctctgcatctgtctgtcgtctctacaacttttttgggcagtggtttgccctgtgacctcatcatctgttgaatataagaaatattattgactttcagtttgctcacgttttgttcttgtgaaaagattgattgtttccaagcttctcacacagtggactagaaattgattcatttcatttatcctttttgggtttgtggggttcttgaatttgtgacttgatgattttgattacttttagaaatttcctggctattaactctggagtattgcttcaacctcatgttctctcatctcctctctgggatccagttacaaatatattggtccttcttcctgaatcctttgtgtatcttaacctgtcacctgtattttccatttgtattatccatacttcattctgaatattttctactgacctattttccacttcactaattctctcttcagctgaatttgctattaaagccactaagtttataatttaagtgattttatttttcagtgctagaattttcatttggtttttctaggtttttttttttttttttgctgaaattctaaattccacctctatttctgcaaatgctgtaagcacagttttgttccagtctctgtctcgcgactccagtgtctggactggtagatcttctgcctatggtctctgctgctttcattcttgctgatttgttttttcaattgtctagaatttttattgtggactgaacattgtatttgtaaaattattttgtagaaatcatttgaggtctattttattttcctccagagagggtttatgtttgcatctgcgagacatgggggcactaggggtcctggatcatcttactctagtttcagggattgaaatcatttcaagatgattacagtttaggttttcctaccctggcagtggtgcaaaaggccctgagttgctgcaagagccggtctccttctatccacccctatgtctagggtgcggttatttgttgtcccaactcaaaatggtgggggtcggggggatgttcgccaactccccactctcaggtgggctgaatctctcgctgtctggctcctcagtgggctgtgagctatctgaagcagcaaatgctttgggggaaaagtgagcgtcccgaaggcttttttcactctggatctttgtctttctgggattttgtttgtttgcattccaagcaaatatttttaacattttgctcagcttttgtagtcaccatcagaaaagtgatgggtccagattaactagtccctaataaccagaaactggaagtctgatggttgttttcagtcttgaacaacattgattctgcggtgaccagtttagagttcatgcaatagaccttcctcccccttgtaaaatcatcactatttcagctaatacttagagtgacctcctggtgactcatcctcagccccctttgccggttcttcttttccccgacattttcattctggagggcttgggattcagtcctttggcctttttcctagctgtgtctgccccctcggggatctcatccaatacccttcccacagcctacccagaccccagtgctgaactccagactcacggattcagcggagcgcagaatgtcagatgtgtgagggccgcctccgatgcagcgcgttccagatggagctgcggcctcccccagacccgcccacccccacccccagattctgttgagggcaaatcatgcttcctcgcagctcacaccctgttggttctccctcccacgttcatctggaatgcggccgctccccacctcttcccgcctgccctcagtcagcacagcagccttctaatggcttctgccctcccatcatccccagaccctccctttcacacagcagctgtgaggtcctcctcaggcagggtcaggtcacgcctctccctctcagagtcctgcctcagcccctcccctgtcatcaacaaagactagactgtgaatggccccatctgcctcctgcctcccgagctcacagcctctgaggtcccggatgggaaatcccaccaggcagtctgtggacgccgcactgcaggcgagtggggtctatcttttcaaagctgatgcccacgcccagagagggtgtcttccatgagagacgtggcctggcagctgctgctgtgggccctgggcccggggacacacccggccctcattgaagacaggaggcatcccgctgggggagtcagatgagatgtccagccccacgtcacctccctgtgctcggccgtgctccgtgaatggcctggtgggtttctgtgtgtggagagctgggtgggcttctagggtcttgactacggggctggatgtagagtactctagagaggctggggatgagatgaggcagctgcaggtggcccctcctcaccgcctgaggacgcgggaccacgccaggcttttctgggcagggtgcccctggctgtgtggcaacagatatgcacagaaatgccacatgggctcctgaggcagcctcatgtctccactggtgggtggtgtgggagaggggacctgagattttgcctggctccttgctatttgggggacgggtgtgcctctggggtcccagctgtgaaccaggttgtttcacctggggtggggtcgggcttggctctgtccccgggtcctgggctttcctgggctcccactcactgccctctgggcagctgggcctccccacatccctggcgcgctggggcagccccatcttccttcctgctgctcaagcgagagcctcgccaccactctgagtgccttcgctcacgctcatccagtgcatttgaaatccccgtgctccaccttcccgacacccagagtcagccccatcacaggtctcatctgcacagggctccctgcctttccctgtctccacctcccccacccctgcccagtcagccgcatcacaggtcccatctgcacagggctccctgcctctccctgcctctccctgcctctccctgcctctccctgcctctccctgcctctccctgcctccacctccccccgccccgcccaggcctgcagctcctctcacccggtgctccacccctgcatctgggctgctggggcccccgtggccatgacagatgccgcagaggcgtcacatcctttctgggtgtgatggcctcggcttctgctcgctcactgcccggcatctccagtccagcttctcctgcagcatggagagaggccacgtggagggtgtgcccagcccatggcccacccaaggtcccctgtgtattggtgaccctgcttggaccttgcaacccagcccagccccacgggatgcagccacgaggtcaacccagccacacctcatgaagcggacacggccaccccgacccttctctagtcctgcacccagagttgtgactgtaaagtgggggttgttttaagccaccaagctctggggtagtttgctccaggcagcaggtgactgagacactgccctgtgggactccccatttctgcactcgctcccctgtatgggggctcctggatcatgccagggtcacgtctgataaacccaatgttagttgaaagcctccagatgaaaggcactcagtgcactccgcctcctgaatatcattgttcggcctcccggccttcaccatgtgcagacgctgacgtcagcacattcgacaaagtccccaattcccttgctctgtttctaaggccccgccacccccacgctgtggctgcgcttccttgtcctcatccttgtccacctgtgttctttccaggtgccctgagtggactggaggggcacagggcagcctggcacctgctgagcccttgctggggccatgctgtcctgagcccctgctgagcaccttatggggacatgagtgggggctcagtctgggaaggaggaggggaggcctggggagatggtctgactagctctgcccagcccctcggtgctgtctggggacaggctggggtccagggcctccccagatgatgggaccagtgtctccagggctctgcaggctggtcggggcggctgacctgggcatttcttcttctggctgccgggaggcagcaaggccccaggtttgcatctcagtggccaagtctgggcgaggcttttcggggagcaggggtgcagcggccaagtgtgtctttggccactctggggccacatcaacgggtcctggggtccctgaagcacccgggaggcagccaggagggcgccagtgctgggctgtgcagggtgggcctgaagaagggggtggtgcctggcggtgatggagtgggcccgtcccatcccccaggccggcagccctgcctcaggagagccctcagtgggctgcagaggggcctcccacggtgagagaggacggggagggactggagtgtggttcatgtggtggcctgctggtgcagggctgggctccatgttggcagggcttgcgggggcggtgctgggcttcacagtggcaggacttgcagagggggcctgggctccatggtggcagggctggtgcagggctgggctccacagtggcagggctggggggtctgtgcccacaaggccacatcaggcacaggggaccagcccccaggacagaggtcaaggcctggattttgtggcccaacctggacccctaactctctccttgccccacagtgagtaaaccgaggtgcagtcatggcgcctgcctcctgccgtgtgtttaggtgaatgaggtcaggccgggtactcacctgtgcatccccgctgctgggaccacagcaggtgcacccacggaccccagccccactccgaccgcctgtgtcctcaccctctgcgggctgaccctttccccctctggccagtggaggtgggaaggctctgagggcccctgagcccaggttccctctctgtggcccttagccctggccacagcactcggaacttctaaccgagccctgccgccatagcacacggtccgtggtgcagtcacctgacactgcaccagggcgtgatgtccacaggcaggccatgccccggctccacacagcggccccggactggagtgccccccgcagagacagcgggcaggaggccgtccttcggggccaccactgtgaccatgagatgcccagccctagagggtcaagggtccgtctgagctgcccgagaggtcctctgggctgagcagggagtgcacaggtggtggccgacgcctgctgctgagagcgcagctctgcggtgttgatgtggaagcagctgagccctggggcatgggctccaccagggccctcacggcctgcgagactcagggctggggactgggtgctgccatgtggtggccctgctgtcagctgcagtccccagctctgacctgcagagtctcactgtctcctttcggcgtttgcggagttggtgcgtgtgccctggccgtgctcggcaagggttcctcccggataaggtggaacccgatttggggtgcgctggtatcactgtcgcaatgatgcagtgtcgtcccgtctgggaacaaggcatcttgccatttatttaggtcttgaatttttctcttcaatgccttgtggtttcagaatgcggcttttccacagagtttgtgagattttcctatttgtcccacctgttcttgctgcctcttctcttgtatcgtttgggactaacggacctttcacatgactctgtgcttactgtcactacccgcttgtttgatactcccttccttccttccttcctttctttcttttactttctttgtctctttgtttctttttcttttcacagtcttgctctgtcactcaggctggagtgcagtggtgcaatctcggctcactgcaacctctgccttctgggttaaagcaattctcctgcctcagcctcccgagtagctgggattacaggcatgagccaccatgcccggctaatttttgtatttttagtagagacggcgttttgccatgttggccaggctggtctcaaactcccgacctcaggtgatctgcccgcctcggcctcccaaagtgctgggtttacaggtgtgagccaccgcacctggccctttggcttacgtcttagtggccaccctcttcagtaggtaggcttctggtacgtgcttccagatcaccaaggcgtagctctaaagagcaccatgagttcataacagcataagatccgctcgccgcccacccgctcgccacccacccgctcgccactcacccgcccgcccacccgcctgcttgccctttgtactatcgttgtcagacgttttactaaatccacatatgttataaaccccacagtgtattatgaatacgtttgctttaacaggcgattatctttcaaaatttgaaaagtaataaaaacagcatttttttttttaaagagacagctctcaccgtgttgcccagcctaaactgaactcctgggctcaagtgatcctcccacctcggcctcccaaagtgctgggattacaggcgtgagcaaacacgcccagccagaaaaacagcatttttatcatccacatattttccctatctagccactttctttgtctgtgtagactcatctggtgtcattttccttctgcctgaataactttgatgtttcttgtaccgcacgtctgctggtgataaattctctcggccttttgttgaaaaaaatctttatttgcctacatttgtgaggatatttttcccgatgtagagttttagcttgacaggtattctcttctttcagtcctttaaatgtgctaacgcgtcgtctgtctcccagctcacgacgtttcacacgatgtcggctgtaattcctgtctctctatgtaacatgcctgttttctttgactgcttttaagatttttctgtgtcactggttttctacagttttattacaatggccgtgccgtggtttctttctgtttattctgcttggagttcatggagcttgtctagatttttgtccaattgaaaaactttattaaacattttttcttgatccctccaccacattagctgtgtgcagcatattgtggatttttttttttttttttgagatggagttttgctctgtctcccaagctgggatgcagtggtgcgatctcagctcactgcagccttcacctcccgggttcagtgattctcctgcctcagcctcttgagtagctggggctacaggcactgccactaggcctggctaatttttttgtagttttggtagagatggggttttgccatgttggccagcctgatctcgaactcctgacctcaattgatctgcccgccttggcctccccagatgctgggattacgggcatgaggcagcacgcccagccattggtcttccagtcttttttccctcactgggcttcattttgaatatttgctattgctatgtcttcacattccttaaaaaatgtcattggatgttattcctgtccatcgtgtttcatttccgatgtatttttcgcctctgaaattgcgtttaggttcctaaagatctgtcattgcactcttcagcacgcttatgttttcctctgtgtccttgaaaatgtgggccctagttgtgactgcggctttaatgtccttgtctgctgatgccatcgccgccgtcctttctgggtctgtttctgttgattcttttttctcctgatcctgggtcatacttccccctttgttgcatccttggtaatttttggctgcacgcttccttgtgagtgctacattgttaggtgccaggttttgttgtaaccctttagagagtgttgggcttagtcctggtatgtggtgaagctgctgggaacccgatgaccctttccaggctggccttgggtgctggcaggccggatgcaggttatctcagcgccgtagcagttccctttggagggctctcccggtgacgctccctccctgtggggatgcagcttattcctggcctgtgtgagttccaggtgctgtccctgttccattccccagggctttctcccatcttgcagtctcatcccaggcacgtgcaagttggtacctttctaaggctttcggggagccctctgtggacctcggtgctccctctctgtgcagccctctgtctctggtcttctgccccgtggctatgccttctgtctcctcagctcagagagatgtctgggttctgtttgcagccccttctgagtcgcagcatgggagctgtcttcaggtggtgagccgggcaagtgtgggtgcccctcacttgctctctcaggggtcatggtcctgcactccagaccccgagtctgaaggctgctgtccacgtgtgttgtcggtttctagttgtttataggggaggggccctttcctagacgggcaccggagtctggctgcttctgtccctgttctctccactggccggggaccatgagaggctctggtggggccggtgatgtttattgagtggtgacgtttattgagcagtggaggggaccggctctgtaaagcctcagctctgtgcaagcactcagcggcctccttccctcctgtcctacagacggggacctgcgcctggagagcactctgcccgctgaggcagagcccgagtatgtgctgccgtctgtctgtctgcagagcttgggagctggtgtgtgagggggggtgtccagagtcctgggcggtgggtgctgggttctcctactgtgggaagacctcagggcaccaagcgtggggctccctgatgtccacgtgggccctgcccatcccccccatcactgagtgcagagtctccctctgggttcccggatggttccagacgatgtgggtgcaggcggtaggtctctctgcagtgtggatgggtccagacgacgtgggtgcaggtggtgggtccttctgcagtgtggatgattccagatgatgtgggcgcaggcggggaggagtgaggggagcacggcgcagggccatgctttctgagccctgactggacacagcattgtatggggcggagacctggacgtcttgagctgggtctcgccgacttccccttccacacatcccaagctgcacaggaggctggcccgggtcccgagggcccctggaagctgccccagccgcgttgctctcagacaggggcgtcctggctgcagcgggggccctgtgccgcctgcggtgtctgagaaggcgtgaacgcctggagaagcccagggacagagactgcgctgggagcagagtgaatgtgtctgttattgattttctccacgtggctcccacgttattgcacacgtgattttgtacttggctgagattaaatattaatacattgaacattaaaagagttttcagccctttaaacaattgtttatggcacaattaaaaggcaaatgaatgatgttttttaggagcaagtttgttggcctgagtcttatttgtgagggctggagctgaggggaggccccttgagggggcgcagagagggaagccgtgtggcatggccacttgcagtgggcgggcatctgctatttattgaggcaagatgagggggcaggctgccctggtgcccctgctccagacccgcaaataccaggagcagcccctgacgagagaccctagccccctagcccatccaccgttttgatgtaaaccaggtttccatgagcctcccatgcggctgcagggggtgggggaggtgggtcagcagagagcgagccaggtgggcagatggggtgtgggccgctgccctgtgcagggtgctcccctctccctggtgaatggaccgtcacctctgcttcctggcgccagctcctcgtctgtctgacttctctcgtgctgtgacctgcagggtcaggaccgcacggcctttcctctgagctggggttcagtcacttgcaactgaaggatcctgactgagccaaactagttaaagtaggaaaagggcctctggagttttcagttacgtgaaccgagaacggcttcaggcacagtggagtccaggtgccactgctggcacaaagcctgggtctccttccatccctcagctctgctgtgtcctgggctgacttgactctgaggcagtggaaccctcagcgtggcaggagctgccggcagccccggaggaaaacgagcacctcttcctccagcatctgctctctcttggcctggaaattccgtcctgagtctccttcccaggtctcagtcctggcggtttgagtggctgatcagaatctcccgcgccgcccacaggagacccagctgggtccggctggtcagtgccaagccctggacctgcgtggtggcgcccccaaaggctgctcggaaccggcccgtgcaggtggacctctgtctgttggttcccctcttccctcttcacaccctttaggtgcttcctgcaagtctgaaaggaggtgcaccctggcccgggggaggtttgcggggtgaacacttaatccggactagtttcaggagggcttcctggagggggctgcatttgggtggtgtcctgatggagcagagattgtctttttggaggaccgggtcccatgtagaggctgtgagctgcccacacactcttcatgccatgcctctcctttctgtcccctgccgctccctgggccagagctggacagattcttcctgagcacctggtccaacccggctgaggctggtcagtggcgtggttaactcggggctgccccggggggctcctgccatctcaggattcccagcacggacccctcccctgcctgcctcctttgctcctcgttgcctgctctaaagggagggatttgggcttagcatgtccacccgatgccacttcttttaactgtcaatacggtcggcatctgccaacctttcccacggtgactggcccctccttgggccactgtaggcagagtgatggggtcaactcgacaattgctttcactgtcaacccaagttctgcctaattagggggaacggcagcgtggctgagaaaatgagggtgtgtgtgtttgagcacacgtgaggccttccaacctgaaacaacagctgtgcccgcggccccggagcctagggggctgtgtagccccaggcccctgacccggcccccaccctccctggccccggggtcctgtggtcgcccaccacggtggcaccaccttgcggggatagcacagaacacgggcttctcagacccagagttttgaaattaggcagatttgagtgatttttaagaacggggtgggagatcggaactatttcacattttccaaatacagtgaggctctagagtgacgtgaaaactggatggtgcagcacggcgatgtcagttatgtgaacagccgccaccctcgtgcgggcaaaagcggctgatgggaaggactggatctgtggctgccactccgctgctccgtggcggtggggggcggtggccgcccagtccactctgcagtgcgggagctgggctccgcgagctcctggcccccacgccgctggacactggccagcccgggtcgaggtggatctagggtatggcagacagagagctggagcctctgggcctcctgtgggaggcaaaccctcacttctctgtagctggaagttcagcaagcgagaagttttacgaggccgtcaataagattgcatctttgttctgatgccgcggtgcctgcgtgatgatttaaaaccgctgagcccgacgtgctcacgggccaggcctcattgtcaaggcacaaggctctgtcgcttaatcacacaccatgatggcgaagctctgatgggattaagcttcccttctgcatctccacctcccttattcctctcagagggggcctgtgaggccaggggcctgtgaggccaagcgcctcacaatcccgctgcctttggggacatcgtcatggctccaggtgtctgcaactctgctgtgaagggttccctgggggagccatcctcccctgaacgggcaccgggtgtcttgggaccatcccactccagctatggcactcaggtgaaccccgagtgttttgtgctgtgactgggaacccgggcattggcaggtgatgtggttccagctgcagcttcccgtggtccttgggaaggcggcttcagggacggtgtaagttgtcagcgtcacccctgggaagggctccgaagcagaaggatgggggtgtctgtctccaggacccagattgtcctatcgggaagagttgaacgagggtggggagggtctcctggggggacaccagagccgagcctgaaggtgagcagagccttcgccctgggtgagtttcgttctggctgagcagtttctctgtggcccaagggacctgcattggttttttgagttgggttaggggcagagagggggagtgatggggctgtgggggtggaggtgggactttgtttcacttagttttataccctccacgatgttctttcccatcaaggacaggaacacaccacccacaaaatgaccttggagagacttttgttattttttagataggaaaaaacaaaaaaacaaaaaaatccccaaacccaataaccatttgagctactttgatggtggaggcagcgaatcccggggaaagccaggctcctaagccccagacgcccctgcctgctgaatcaggtccccgcccagtgctcagatggtcacgggctctgggatcctgcgggatttggaggaagaggccgtgctgcgtccgggctggctctgcccacaccccggcgagagatgctgacttcacattcacctctgtgaagatcacaggatttaagctgtcagcgtgggacgggcatgtgctttaaggatgattgcgccagcaaagccgccttcctgagccatgcttatgccaggctcctcctgtctctgagcaaatgctggccgcccggcccgggagcttccggaagctgtttgctccccgtgtgcaggaggaaatgtgtgtctgcagccatgtgtgtgggccgctgtctcctgctgcacccggccttcctcacggcaagagctctgtgctctgtgggctctggaaggaacgttccgggccggtgtgtcttgagagtgttgggcagctgccgccctgggggaaggaccctcactaggctggcccggggcaggagcaggaaggatgcggctcagctgccgcctagctctgtgtgccaagtccctgcagggaccctggaagccgagaggggcggctgggtggccacgcagcggggtgggaggtgaggggcctgaggaagccgcggtgccgcgttccctgggcagcgtcgctcacacacagggaggctcattcacgctcactcagcacggccgtgtcaaggcactgcaagtacactgacacgcagcttgcggtgggagggacggtggggtcctcggaccacccaacacagggccgcagactgggctttgacaacagaaattcagtgtcactgtgctggagccggaagtgggagacctgggtgctggaggtttgctgcgatcctggtgttccttggctcgagaaaccatcacttggcctctgccttcatcttctcacctttccacgcctctcccgtgcgtgtctgtgtccacgtttcccctaagggcacagtcacattgaattagggcccaccctactctagcctgaccttgtcttaactaatgaccctgcagtgaccttcctcccaagtaaggccacatctcaggcaccgggatgacgccttccacactagaattcttaagggacccaattcaacccctaagagggatgcctgagctgaggtctgtcgtggacaggctggagctctatcccccgggcctctctcctgcctggtgcctcccatttaaggagcaggttgaaggagctgagacccccccttgggcattgagcactcctgtcttggatacaggcttccccaatgctgccgcctctctccctgacctcaacctgcttccctgcactgagcctcacctttgaacgtccttccttccccagcgcgtggagccccgcacagctggggcagctcagccgagtgcaggcggtggcaggtcccaggggctggtgtcttgggtggggcctggtgtccgaggcctgcagatcagccctgctagccctgcccagtgcccaggctgcccctttgcctggttgggggttggtggggcagggagcctggtgggcttcactctgggtctaccaggaaggtggcactaggttaatcattattgccccgaccccctccgtatgggggggcaggaccagctcagaaattttagagtaccacgcaaaataagaacgttgggcttcttgctcaaaaatgaagaattctgggacagcagtggcggagcatgcagccttctgagcgcagacgtcgggacaccagggacgctggccgggagcgagggaggggctttaccgaggaatgggtttcctcctccagccttgttctggagatcacgcctgtgcaatctttttaaatacagaacagaaaaaaatgccagccccctgcagcctggtcacgagaatgccaggatctcagggcacctgctggctgaccttcgctgagatagaatttacacactgcacatgctcccatctgaaagggatgccccgcggccttcagcacattcacaacatcgcgcaaccattgccactcattccagaacttccaccaccccgaaaggagcccatcagagtctccccactgcccctgtcagctccttgctgtccctgtggacttgctggttctggacacttcatggaatcagaattggtgtgacacagggccttgtggcgtggactacggccctctgagcggtcttgacctgttcacctaaaaccagacgctgaaattaaccaggcccacctctccaggccagggcgggtgaattcccggggacccagcccttgcctgcaccaggagagtaagcgacttattaatagggtaatttatgcgggtgcctgcgcaccgggacggaccagcatctatcatggctgttttgcgtttcttgatttcacgatgtctgttgtgtgctcaggcccctcctctccaaggtcccagctgtccttgccctgttccctgtgaagagtgaagaaccaacgcgggcggggagtggaccggtggggagagggccggtggggagaggaccggtggggaggggccggtggagagggggccggtggggagggggccggcggggagtggtttggtggggaggaggctggtgaagtagcgtcaggtgcgggcctggcgtcggcgagtcaagtcgagctgatccagggccttctttctgcagcttcatcaggttctcaattagcggagggcgctggcggtggaggagggcattagccgtgcctgctctcgggctctgcctgccagagtgccctcatgtggcatgagattaaggctcagcctctttcctgacagcaggttttccatttttcttctccttcctcctctcctggcaacaaagtcctttgctgggctggggggtctccactctgatccacttccctccttcctgcctccctcccacgccctggaaaccccggcccatgactctttccctgagggggccgcccgcagcctctcccccatgggggctttgctctgggcaccccctttcccccggggcgggtggggcagcggccgggactcaggaagatggtggcccagtggggctctctccttgggtgtgtgggagcggagtcccctcgctcttctgggatagaacgctccgttgagctccccaaactgctcccgtgccgagctctgggggagggagtctgttcagagacggtgcagtcctaccttttagaaggtacgcctgcctttttaagcagctcagctctcaacaatgcacaagtggcttgagtagaagagctgctcctgctgggaggcgcaggaggctgagcgaggcccaccctgcaggggcgaggccacggtttgtgttatttcccatgatgactccaaacgcacccgagtcccccgggcctccgcgcctccgtgtgcaggtcccccgggcctccgcgcctccgtgtgcaggtcccccgggcctccgcgtctgtgtgtgcaggtcccccgggcctccgcgcctccgtgtgcaggtcccccgggcctccgcgcctccgtgtgcaggtcccccgggcctccgcgcctccgtgtgcaggtcccccgggcctccgcgcctccgtgtgcaggtcccccgggcctccgcgcctccgtgtgcaggtcccccgggcctccgcgcctccgtgtgcaggtcccccgggcctccgcgcctccgtgtgcaggtcccccgggcctccgcgtctgtgtgtgcaggtcccccgggcctccgcgcctccgtgtgcaggtcccccgggcctccgcgcctccgtgtgcaggtcccccgggcctccgcgtctccgtgtgcaggtcccccgggcctctgcgtctctgtgtgcaggctcaagtttgccaacgtccatgcacgtctcagcctctcagcctggactggacaactgggcttcgggaattcatttaaattctacccgctacacgccttccctggattcagggcggcgtccagtgcattcatcacgcgtgtgctgccgtgaaggtgcggggaccccccccaaaaggcttccttccctgtcctgcgtcctgcccacaaggcggtgctgctggcaccaggcctgacctggcgctgccagtgctccactgttttgagttattgaccaacaattcactctcgggtcccgaggggaactggcctgaggccactcaagcagaggctcaatgaggaaagataaatatttcatggtctgggtcggtgagagagggaaatcaatagcgcatcccatcctcagtacggcgcaggcctcccacccaaggcagcgagttgcatcctccgtgccgcgcgggccctcccacccgaggcagcgagttgcacttccgggcttgttctcttcctccctttaaggcaaggctgcaaactgccaggccgatggcccgtgctgggagcaggcaggtgtcctgactccgcctccagccggtgaatcagagccctgagattcaccaagggccccctgcccgggtcgtggaggcagagcctggggctgggagaggcccttcaggacccctctgtgggagccggacgcaggcctggggatgttggaggtgggagcgcttccaggccccttgtgtaggaccagaggctgctccgaccctgctcggggctctggagacagaagaacggcatgagtgtttcacaaatggtgcagacagttcacaggtcaagacaggggacaaaagtgaccacttttagttaaaaacaggtgactccgtcccaggacaagcacgatgctgtgttaggtcccgttagtccccttggaaagctgtcggctttccctggagaggacctcgttctgtccacgccactgccctgcgagcgagagggagtgcgagcggggcgtccacgcgctcccatgggggacctggggctgcttcccgcttcccgattttccttcagcgctgctcgtggcgtgccctttctcccgtggcgcagtcaccagcaggacgtgtgtcccgctcacgctttgggaaacacggccttgtagcaggagctgctctcggggttcagcatcgggggtggcagagcccagtgcctgctggggcattgccaggcatcgtggagctggacccagagccaggggtcccagctgctgctcctcaaggaccctgtggctcaggaaagccctcccattgctaacgtgtcacccgaagggcttggggacctccacgcaggatgggcttcaaaagtcagctcaggcggtgccctggcctcgggtgcgcggggagaccactggcctccctcatgccggctccctgctgactgtctcgtgagctcctggcagcccttctagaatgttctggcgtggctccctgctcacgtttctaaagcaactatcagcccatcctcaattaccgtgtctccaggaccacagacgacctggagcagcaagagtcagtgctggggccgggcgcggtggctcacgcctgtaatcccaacactttgggaggccgaggcaggcagatcacctgaggtcgggagttcgagaccagcctggccaatatggagaaaccctttctctactaaaaatacaaaattggccgggtgtggtggcgcatgcctgtaatcccagctactcgggaggctgaggcaggagaatcgcttgaacccgggaggtggaggttgcagtaagccgagatcgtgccactgcactccagcctgggcaacaagagtgaactccgtctcaaaaaaaaaaaataaataaagagtcagtgctgggacgagaggcaccggtaacatggccagtgttgcagccggaggcgggcagggctgacctgtccagggaccagcagagctcgggcaggaggtgaccctgagtcgggggagagggggcgtgggagcctggggctgggggaggagggaggatgtcactgtggatgaggctggttcccagcctcaggagccaggcccgggcccctccagctccacctgtgctcacctgggcaggtgatgccccatgctgagcctctgctctctggtccttagggtgggggtgcagttcatgccccatgggctgggtgaaagaataaacccccacccagtgggcacgtgcggcgggcacccagagtgcttgaagtttccttgtgaggctgctgctgactctggggagggacggtgtcgttggagtggggccacctggcttggcccgttgcccttggcagcaggaatacagctgccctgggggctcctctgccacacgggcactcaggggtgctggtcgttgggtccaggcagggtgggggcaagagccactgaggggccctttgtttgcatcttaggtgacgctgcagaggtgagtggccggggcatccagagcttccctgaatgactgggccacgacgatgaaggcgtcagggctgcagcctgctgggcgtgccccagccaagttttcaggacggcctctgcttctccttcggggaaggagcagccctactccctctgatggggctgcctgggagggttggatttgttgtttgtagggaaagactggggcggagagcagggtgctgtggcccctctcgtccctttctggttcctggggctgtccgcacagagcaggtggggacacgctggctggatttcatctggatcagaggagggtgagaggatggtctcctggtggggagtgcagagcctcagctctggagtgtggagaaggatccagcttgttgggtggtgtatggtcagaagtggggacctcggggcctcagatctggcctctgatcccaactctgttcccctcggagccacccttccctcatccatcaggagccagtagcagccccaggacagctgccgtgggataaataaaaggagccgccttcaggagctgcctgccgagtgtccacagaacgtagcgtcttcccagcactcagcgggtcctgatgggcctccttcccaccgccctcttccgagtgtggggagctcaacccctgacttggggtcccgggacattcagttttgtgtgtgatcagggaggcagcgcctgacccacagaaagcacctgctactggtggggtctcagatctgtgcacacctgtgtcccgggctcctcactgtccgggtggtcacactgtccctgcgctgctggacttgggggcttgggtgcagccagccttgtgctcctcagcctccctggtacaggaggactgtccatctgcctggcaggggcaaggccgtcttcagcggagagacctggaggccacgtggtctgctcagaagtacctgcatgcagtttgatgccctgctgcagcaatcttgaaattcttagtaattttatctttgaatgctcgctttgtaagtgcaatctaaggatggtggcgtgagcatgactgaaggaagctggagatggtcagggtgcgagtccactgcggagccagtaggtgccagtggttcgagaggccacgctttcccttgactcagagctggccccaagtgcagaaaggaggtggtgttgctctcagatgcccacacaaccaaggacacatcccccccgtctccctgggactcccatgtgagctggccacctgcactgcagatgacgatgtggaaggagagagaaagacaggagaccgcggcttttcctttcagtccttcgtacccaacagcaactgagagggcgtcccggcagggtatgaatggccagcaggacgctgaggctgcgtggcgtttccaccgtgctgcaggaacaagatgcacatcgtgcaggagccgcagagcacgcgtgcagaggtttcggtggctttgccccgcagctaacgtgtgcgtgtgtgccttgacttatatttgcattacttagaatgacattcaatagcaaatgaaagacagccggcaagtcaatagagagaatgcggaaggaaggagaaggctttgtttgtggctctgagggcacttttcctcctgcatttgcattttgcactgtgcagatttgcaccgtgcagccacccgggcctcctcgggtctggggctccatttccagcacccccacccagcgctgtgggcccctcccccacgcacctcccccactttggtggtgacagttggttgtggaggaacaatcgtcagtgatgggtgaactagctgtgtttcacgtggcctcctcatcactctgccaagcccctggggcaggcacattttggctgccatcgactctagaatgttctctggtgtctccagggggtgtgcagagctggtccctcccagcgaggagctctgctcacaggttcacaccccctgccctgttctccaagatgggaatgtctgatgagagccccagagaagaatcagccgctgggggtcggggaggtgttggactctcttgaaacaaaggaggcccaagcctggggtcacggggctgggggtgggggtggggtgggagggagtgggcagtgacctgagaacaggaagggaggtggaggtcttgggtcacgggtgatggatgatggaggaacaggcccaggaggccctgcttgctgggggcttctttcctcttgcgtagtcaccctgtggggggctctcaaactcacagagtttggccgtagggaagtgcaggggtggcctgggaggctgcaggctctgggacagcctggctcacacaggagatgggatggcgctgagaggagaccccggggcgcccagcgtctcaggctataaggagcagccactcattgtgacacccgatggtgaaatgctgcattattatttatggtgttgaataatcacagcacaatcattgcaggccacagggcagaaagtgctaatgtagtttaaaaacagtacatttgaatctggacactggcaagaaaataggcaaaataaatacttttgtccacccctccctaccctcttttggtgacttggggtggcctgggtcggtgctcagcccagggtcccgcggccagagccaaccatggcgcgcctggtctcctccagataaacgcgcgcccacgtctctgctgggctttggaattagctcaatactcattcagacgcagagtgcgtgtgccctgccaggacagacgtcattgctgtgcggtgcttgagtgccatcaataagccacagaagagaaatccggaaacaagggacgcgcagcgtgattccgtgccacggcgtcaggagcggcatgtagcatcttttggtttgagagtaaaattccgcaatcagaaatgaaatccgagcaaagaagcaaagcgcacagaggctggagacgctaaagcatccaggcaggactccgccaggtgggcaggcagaggcctgtgcacaggcagacggtgtgcccgtgagcaggacatgcttgtagggtcacaggtcacccacccgcaggacacgcatgcaaggtcacgggtcagccaccagcaggacacgcatgcagggtcacgggtcagccacccacaggacacgcatgcagggtcacgggtcagccacccgcaggacacgcatgcagggtcacgggtcagccacccgcaggacacgcatgcagggtcacgggtcagccacccgcaggacacgcatgcagggtcaggggtcagccacccgcaggacacgcatgcagggtcacgggtcagccaccagcaggacacgcatgcagggtcacgggtcagccaccagcaggacacgcatgcagggtcacgggtcagccacccgcaggacacgcatgcagggtcacgggtcagccaccagcaggacatgcacacccatgtgtgcacatgggtaggtgtgctcgacccacacatgttgtgccatcaccccatccttgtccttggagaaagggctattggccatcgtgacggggagcctctcagctgcgactgggccctgggagccatggagtcttctggccgcctctcctggccaccaaccaggaaccccaggccccaggcccacggttgcatctgctgtgccatcctgtggacaaacggacgatccaatccagatggcactgcaggggactgaacggggctctgaaacccggccggagctgccctcaggccaccctcctcaccttgagccattcccctgctccgtcacctgtgtcaggcctgggtgccgccaggaggcctccttccagctctctgcaagctggccccgtgttcacgggcatccagcgggatccaccatggaaagacagctttctcagaggcatctcagcacgtgggcccagccagaacctcgagggcttctgtccctggagggcagggcagagcgggaggacacagggacacagagaaggtatcagctggcgagggcagggcagagcaggaggacacggggacacagagaagatggcagctggctgagggcagggcagagcaggaggacacagggacacagagaaggtggcagctgactcggcgggagcggaaggtgctgctttcttcgaggtccccctctttgcggctcacccttctccctctatggcccccttaaccccaacccccctcggctgcctctctgagtaaaggacaggccagcgccgagcaggtatgtcccctgccagggtcccccgcacacctggatcttctaggctggggagtagtggaaggatctgcggggctctcgaagccgtctgggaggaacgtcaatgaccagaggaaggaacaagggtttcgggtgggattggccaattccctgggtcatctcagaaccacgagcttgtcttcctgggttacagggtcctgagcttggccgaaaagggacaaacgaagggccgggtgtgatgaccctgcataggtttgacagccctgtgtccttccaaatcaagtgagtgggtctgggtccccggccccctccagcctggggtccaagcctccctggtctcctcgggcagtcagcctctctgctccagtgccgtcagttgtcacctacgtgggtaaaacgccaggagaggctggatccccagctcaccggcctgtggcccgggcatcctgggcttgcagagggagggccgagggtggtaactaggaggagtggctctgagccggggagggaacacggccagagggggatgaaggccacacggagcaccgcgggagccccgccgtctgcgcagggttcagcctttcagcctcgatgtgggaagtctctccatctgttcaggttttctttgggtctttttaccagccatgtttcgcagtttgcagcgtacaagtctcacacttcctttgcgaaattattcctaagtagcttattctttctgatgctatttgaccaggacgctttctgcatttcatcttggggtgttcactgtcagtgcagaaatatcctacgccccatgatcttgttaaactccttcgatcatcttatcaggttttacttcattttattttatctttgtagattccttaggcgattccacctacggcgtgaggcgtacttctacatcttttttgctaatctcggtgatttgagttccatgttcttgcctcactgccctggctggaacccgctgtgcagtgtgggaggagcgggaggggagggtccccttgacttgctcccttccgtggggagacggtcaggctttccccaggaagcgtgctgtaggtttccatagattcgagacggtcaggctttccccaggaagcgtgctgtaggtttccatagattccattgctaggttgaggaggttcactctcatttctggtttgttgaaagtttttttttaattataaatgggtgtcagattttgtcaaatggattttctatatcagttgggatgatcatgtggcttttgtcctttattttattaatatgatttattacattaattgagttctggctgttaaaccaatctttcagtcctgggaaatatcccacttgatcatggtgtacagtattatctttttaaaataaattgttggatttggccaggcacggtggctcatgcctgtaatcccagccctttgggaggccaaggtgggaggatggcttgagcccgggaggtcgaggctgcagtgagccgagatcgtgccattgcctgggtgacagagtgagaccctgtttcaaaataaataaataaatagtcgaatttggtttgctaagttaaaaaaattaagtaagtgtcccgctcagcagcattaattacattcacgatgttgtgtcaccatcaccaccagctacatccccaactccaaacagaaaccctgtctccatgaataacaactacccattcctctccacccccagcctctcttaacctagaatgtactttctgtctgtgaattaggctcttctagatatctgatgcaagtagaatcatacaacatttgtccttttgtttctggcttatgtcactcagcacaatgcttccgaggtcgctcagcagggggcttccgaggtcgctcagcacggggcttccggggtcgctcagcacggggcttccggggtcgctcagcacggggcttccggggtcgctcagcacggcacttccgaggtcgctcagcacggggcttccgaggtcactcagcatagtgcttccgaggtcgctcagcacagcgcttccaaagttatttacctggtagcgagtgtcagacttccttcatttttctggctgaatcctattcccatgggtggatggaccgcattttgtcctccattcatctgctgggggcaactgtgctgtttccacctttcagccattgtgagtaacgctggtatgggagcctaagtgtctgtttgggtgtttgtcttcattcttccggacctacccttgggagtggaattgctggatcgtaaggcagttcggtgttccactatttgaggagctgccaaatcgtctcccacggtggctgctccattttacattcccgccatcaattccaacttctccacatcctctctgaggcttgttattttatttttatttatttatttttttgagacagggtctcactctgttgcccaggctggagtgcagtggtccaatctcagctcactgcaacctccacctcccgggttcaagcgattctcctgccttagcctctcgagtagctgggattacaagcgcatgccaccacacccaactaattttttgttttttggagagcagccgtcctatcgcatgtgaggtggtgtctctgtggttttgattcacatttccctagtgaccagtgagtgctgttgagcatcttttcatgtgcttattggccattttatatcttatttggagaaacatctattcgagtcctttgcctatttttaaatggaatttttttgttgttgaagtgtagcagttctttataaatcctgggtattaaaacccttatcagatatatgatttgcaaatattttctcccactctgtggttgacgtttcactttcttttttttttttttttttcgtttttgagaaggagtctcgctctgtcacccaagctggagtgcagtggcgggatctcggctcaccgcaagctccgcctcccgggttcgcgccattcttctgcctcagcctcccgagtagctgggaccacaggcgcctgccaccacgcccggctaattttttgtatttttagtagagacggggtttcactgtgttagccaggatggtctcgatctcctgacctcgtgatccgcccgcctcggcctcccaaagtgctgggatgacaggcatgagccactgcgcccggctgacgtttcactttcttgatagtgtcttttaatgcagaacaactttaattttgatgaatccaatttatctgttttctgttaaaaaaatttttttttttttgagacagagtctcaatctgtcccccaggctggagtgcagtggtgcgatcctggctcactacaacctttgcctcctaggttcaagcgattctcctgcctcagcctctagagtagctgggattacaggtacccactatcatgcctggctaatttttttatttttagcggagacagggttttgccatgttggccaggctggtcttgaactcctgacctcaggtgatcctcctgcctcagcctcccaaagtgctgggattacaggcgtgagccaccatgcctggccctgtcttttttcttttgttgcctatgctttctgtgccatttaccattgccatgttgaaggtcgtgataatttgcccctatgttttcttctaagcgttttatagttttagctcttacatttaggtctttgatccatttcatgttaatttttgtatatgttgtaagataaatgtccaacttcattgttttgcatgtgtaaatacctttttcccagcatcgtttgttgaggaggctgccctttcctcactggtgttggtcccttattgaaagtcaatggaccatgtatatgggggttcatatgggggttctctgttctactccattggcctctacatccatccttttaccagcagcacattatcttgatgactgtagctttatgagtaagttttgaaatcagaaaacgtgagttctccaagtttgttcttcgttttcaagatcgtttgggctatttagggttccggaagttctatatgaattttaggataaaggttttcaatttttgcaaaaattgctgttgggattttgataaggatgacgttgaatctgtggattgttttgagtagtactctcatcttaacaacagtaagtcctccagtctgtgaacacgggtgactttccatttatttgtgtcttcttaatttctttcatcaacgtcttgtagttttcagcatacaagtctttttcctcctgggttgaatttattcctaagcatctgattcgtttcgatgctatcgtaagtggggttcttttcttttcggattgctcattgctagtgtccagctgacttctaagtaatgattttgtaccctgaatctttgctgagttcatttattaggtttaacagttttttttttttttaatggttctctgggcttttctacatggtgcatatcatctgcaaatacgtgccattttagttcttcctttccaacttggataccttttgttcctttttcttgcctaattgctctggctaaaactcccagtattgtgttgaatagaagtggcaaaagcaggcatccttgtctttttcctgatcttggggagaagctttcagtctcgtaccattgactgtaatgtcagttgtgggtttttcatagatgacttgatttactaaattttactaaggatattttggtttacgttcatgagggataatatcttatagtctgttcgtgtctttgcctggctttgataccagagtaattctggtttcatagaatgaattagaaagtgtttcctcatcctctaccttctgaggattttgtgtgagattgctgttatttcttctgtaaatatgtgatggagtttactagtgaagccagtgctatttgggcattaatttctttacttgttgtgggtgtcttcaggttttctctttcttcctgaactcattttggtaatttgtgtcattctaggaatttgtccatttcatctaagttgtcaaacggttggcataaaatggttcataatgctcctttataatccttttaatttcaataggatcagtagcagtgttctctcttttattcctgattttagtaatttgtgtcttctctctttttttcatgggcattcttgctaaacatttatccactttgttgatttttttcaaaaaatcaagtttgatgctgctggttttctgtatcggctttctgttttctgctgcactgctgttcactctggtcttttatattatcttccttctgcttggttggggttggatttgttcttctttttcttgtttcttttggtggaagattatattattgattatattattgatataatatgattatattattgacctttttgcctttgaaatatgggtatttaaagttatgaatttcctgctttagctagatctcatgcgttttggtatgttgtggttttgttttcataagttcaaattattttctaattttcttttttgtgatttcttttttgactcatgggttatttagaaatgtgttgtttagctctcaaatatcaacttatttctccagtttatttttatttttattttttgaaatggagtctggctctgttgcccaggctgaatgaaatgcagtggtgtgatctcagctcactgtaacctctgcctctcaggttcaagtgattctcctgccttagcctcctgtgcagctgggattacaggcacatgccataatgcccagctaatttttgtatttttagtagagatggggtttcaccatgttggccaggccggtctcgaactcctgacctcaggtgatccacccaccttggcctcccacagcactaggattacaggcacgggccaccgtgcctggctatttctgttcttggtttctaatttaattccattgtattagagaacataccttgtacgatttaaatacttttaaatgagtgagacttgctctgggtctagcctacgggctctcctgaaaagtgtggcactgctgctgagtgctgtcatcatggggagcgatctataaataagagtttgggtaagttggttgacagtgctgttaaagtcttctgtgtccttactggtactctgtgtagatgctttattcgttatggagaatgggcatcgcaatctctcatgataattattgaataatatatttctcttttcagttctgtctcattttacttcatatattttggagttctcttgttaggcatgtatatacatttatgtctttctgtcaatattgacccttttatccttataaaatgtcctctgtctctagtatttttttccttgaagtctattttgtcagatggaatatctgtgttccacctctgttgcagttgttatttgcatcatgtgtatttttctgtccttttgctttcagtgtatttgcatcttgaaatttaaagcatgtctcttatagatggcatgcagttgggcctggagtagtttatccagtccaataatttctgccacccgacagtgttgttgttggtttagtggcatttttgtctctgacgttttgttccttgctttctacatgtctcgtgtcttttttgtttctgttcctcctttactgccttcttttgtgttaagcaaatatatctcagttaccctgttagctaattctgctgccgattgtgttaattgttaaccatgttttgagttgtgttcttagtgattctccaggaaaccagtatatatcttaatgtattacaatctacatcaggtgaatactgacttaattccagtaaaatgtcacctctgatccaggacagagccgttcccgcctgaattgtgactgcacacccagtttgtccctgtgtccctctagcctgagggtggcgttggcttcctgtagttgagactttccgagttgctcctcatccccatggggaccttctcacacctcttcaaccggcatcccatatcgaacccctgggtatgtgctgttttctcccatggactccaatgggtgcaggcatctccacctgctgtggccctgaccctccccttcctctcgatgttcatggggcatttaggggcttcgtctggggatggattaaagggcctgggctcctggggaggagctcccctgttctcccgggctttcctcggtctcccactcccctcaccctttgtggattttcctgggggattttactttattaaacgttcatgagcagatattctgctgccaggaaagaaaagcaatgaccagagattcggctgtgaaaaaaagaaaatggaggggttgggacaccatatcattcataggaccccttcattccaaagctcagcattgggctgaggcctgggcggagggcaatggagaggtgcagcgtgggggctgagtgcggcttggctgggtccccaccggtggccacggcacctgcaaggccacagggaccccatgcggggaatccgtgggcctctgtcgtgaactgcagccagggaccctgaagggctcgggcagctggggtgctctctgcttctgctgcacgcctggctggtgcctgagcagctctgcgatgcgcatcatggtcggggctgttttggggccgtttccaacaccagcagcgtcgtggctccacagcagcaaggcttcctgaaggaagaagggggcttcgcagtatagttcgagtcgggctctgtttctttccatcccaaacacatagagacgaccaaggccctgatcccaaaagaagaacccaggctgccggcgatcctggggacaacgatgttaactcagggacaggcgcagtctctggaccaggccaggtcgtggtgcacacactcgatctctgcagcgtttcccacatgggcactgcggaccgggaatgtcaggggaacgcgggcaccgtggaccgggaatgccaggggatcgtgggcaccgccgaccgggaatgtcaggggaacacgggcactgccgaccgggaatgtcaggggaacgggggcactgcagaccgggaatgtcaggggaacgtgggcactgcggaccgggaatgtcaggggaacgtgggcacggctgaccgggaatgtcaggggaacgcgggcacggccgaccgggaatgtcaggggaacgtgggcactgtggaccgggaatgtcaggggaacgcgggcacggctgaccgggaatgccaggggaacgcgggcactgcggaccgggaatgccaggggaacacgggcactgccgaccgggaatgtcaggggaacgtgggcacggccgaccgggaatgccaggggaacacgggcactgtggaccgggaatgtcaggggatcatgggcactgtggactgggaatgccaggggaacacgggcacggcggaccgggaatgtcaggggaacgcaggcacggctgaccgggaatgtcaggggatcgcgggcactgccgaccgggaatgtcgggaacgcaggcactgcggaccgggaatgtcagcagaacgggggcactgcggaccgggaatgtcagggcaagagggaagttgtttgctagcttgtcatatgtttagctaattatttaatttccctaatttaaagtttcaccggattaacatcaaaacaaaaatcttgtgattgcagcatcataaagcaataatgtaattaacttgtttagggtaacttactaacttggctgattgcaaggcatggggtctgggggcaccacacttgaggtggtcggggcgcttgtcaggcccaggctcctggcctcagcgcggcgcccagctcccggtgcacagggctcccaggccccggtgaggatcaggccactgtgccgcctcagggagtgggtgccggcctcacccccagggctggggctctcactcaggctgcgggcaggcatctccttggcccagaagctctgaccttggccacagttgggttttgagcacgcagcccagcagaaatgccgttccgaagccgtgcaggctgtgcaggccgggacaccctgctaaccaggagtggaattgagaacaggatttctctacaccacgagttcctcccagaactctggaacagattccaatgttgtttgaaaagttaccaaaccctgtttgatcagcatccattgctgagagagcagctttctctcttccccttttcctcctcccctctcccacctcagcttccacagaggtggcgtgcatggcgggaaccgtctgtcctatcggagcctggagaccctgggtctttcccttcagcagcttccacagaggtggcctgcatggcgggaaccctctgtcctatcggagcctggagaccccaggtctttcccttcagcagcttccacagaggtggcgtgcatggcgggaaccctctgtcctatcggagcctggagaccccgggtccttcccttcagaaatccctgccatctggttttgagactggctttgggggacagtggccctggtggggattcgggcatgaaaggccccctgttgaggtcgagcctggcagcatggggggactcgctcgtcttcgtggtgggcctcacagacacagccatctgggcacacaagagcattctggccgtgcatgtgtgcaaatgagaaccgtgtgcttcagaaacagactggagcgtgtggggacagacgggaactcacacacacgtgagctgccccaggcccagcagacactgaacgtgaggtggcttgctacagccagtgggcagaaggggcaggttttggtgttgggaacccagtccccgaggctgagaaactgcccacaaacctcctgctgttctttgaagtgaggggttcattttgcgtggagcccggagcacagagcaggccccataccaccaggcaaagcccacctggctcacctgctccctagccccgagatggtttcaggatgaggcagtgtggtcaatttggagaaaaatcataaaaccaattcaagcctggctgcccaggttttgggatccaccaactgggctgctttttctcaattttagccacatcgccctcagttcgaggaagtacttcccatgagcttgtgctatggtgtgaatgtttgtgtccctccaaaattcacactgaaacgtcatccccagtgccatagtacggagccttcgggaggtcagtaggccgggaaggctctgccctcaccaatagattagtgccagtagatacaagggcgggagggatgagtccgttccttctctcccttctgccatgtgaggacacagcaccgctcccctccagaggacacggcagcaaggcaccatcgcagaagccaggagccgctgtccccagactcgaggctgcagtgccttggtcttgcacttcctggcttccagaactgcgtgaaatacatttcaatgctttataaatgacccaatcacaggtgttctgttacagcagcacaaacacactaagacagcttggtagaattttctagaagctatctgctgattaaacaacagggaaaaggtggagtctgagagggagtagtgtgtgaaggggccctgctgggagaggttttgggaatctgtgggcggctttatagttcttggcactttcattttcctcttgggggtcggtttggtctaggttcccccagtgccaactctgacctaatgggggttgggtttatctgacaggtgattgcaggaggagagggatggaggaaaacagtgcccaggctgggacaaagggggctcggctctaccggcatttatccaccatcccatctctcggtgcgttgacgccctggggagctcacccccaggcagaagagcacaggtgcctggtgtgttcgtgaagcatcctcagaacctgggggggtgtctagggtcctcagaacctggcatggaggggggtgtctagggtgggctgaagggcatgcacagcatctccctttaggaggaggaagcacctgccatccagcaacccgccgtgagcgccgtactgcacagtcctccctcacctctccgaggacagactctcctgcaactgaggagctggatgtctgccttttcttacattctacatctaccctccctttctgagtggtgtcagatcctcggcttgggaagaaaatgcaggctgtggtctctcagacagctcttcatggtgacacatttgctcggcacctgctgtgtccccagatcaatgccagtggcctggggtcagagggcaggtgcacgatttgggtccagtttttcccagtgggtcatatgtggatctggggcaagaaccaccacccaagaggacgctactggcatgcagccctgagcatttttctgtttttctttctcagctttacatgttcagggtgtagtcagatggctgtgtgcaactgcagttcactttcaaagctgtgtatctgttttgcgaatgtgccgccgtttctttacctgctcattggctggttttgtggatgtgctaccatctcattggtcagttttgtgaatgtgctgctgtctatttacctgctcattggtcggttttgtggatgtgctaccatctcattggtcagttttgtgaatgtgccactatctatttacctgctcattggtcggttttgtggatgtgccgccgtctcattggttggtggcatttgcgtggtcctcagctttgggttgttttagactcagcttcctgaacactcttgtccgggtctctcatcttctgaacactcttgtccaggtctcgcatctttcactttggctgttctgtgggtgtgtcgtgcgtctcattgtttgatgactgaatcgccattataatagcatgaaggtgcagctcacaagcgtccacacaggcgaattcacgtggtggctccagaggaatgttggccttgcagagtcttggcatctccgtggcttcccatgagcctgcgagaatgctgggcctgtgatggtgacagcgagtcttccctgtcctcaggggtgcggccttcaccttggaaacatcatttgtccccctctgtttgggttcaagtcaggttcagtgactcactagaaagacagacctgagaaacgcagttctagtcccgattatggtttattaaaacaaaaagacgcgttaaactcagtgaagaggagacgcttgtggagcagtcatgggcggcaggcatgagctgctgggagtgctctcccgtggagctgtatacacagcactgtttctcccagcagccagcccgggaggctcgcctgagctttggtggccatggtttttactggggctcagtcatgtagacttggagtccctgtgtggctgaccctagttactcagtctcaagctgaccctgtgtggccccaacctgaaatcccatcatttccttagactacccaacgtggcccaaagcccccaaaatacaatgttctaatggctcaggatggcttcccaggtgctcgttaattgctggacttttatttggaatgtgtggggtgtgggcagcccaggcctgctgagctcaccgtcactgcacgccctctgatgtggcctggctccaggctgttggcaatctgaccctcactcctggggtttccacaactgtgagttccctggcgggcccctgagggaagttctagagaagaaagaggaacacaggatcagcctcaggctctgggaggagaactggaccccattgtttgggcttggacagctgtccaattgctcaggacctgggtgctgggtggaggcctcatcagcaagtgtcctgactccacgggtggagggatctcacactgcccaccacagtggcagcctcagagtaagcacgagcctctcgccctccatgcgtgtataaacaacatggctggtgggtgcctaggcccccagggaggcccctggtatgaggccagcggagggggcgggtagggaggagccctctctcttgcacttaggtctctggagtgacagggatggccctgccccactgacccaggcgttcaccccagagaagcgtgcaggcaggtgagaagcttgtttggacctgaagaccagcctgagcgaggagagtcttgtgcagacggtttatccaggaggagcccggggagaggggggtgggaaaagccacagttttggaggtcagcaaggtcatgtgggggcagactcctcctcctcctcctcttcctcctcctcctcttcctcctcctcctcttcctcttcctcctcctcctcctcttcctcctcctcctcctcttcctccctcctcttcctcctcctcctcttcctcctcctcttcctcctcctcctcctcttcctcccctcctcctcctcttcctcctcctcctcttcctctcctcctcctcctcctcttcctcctcctcctcctcttcctcccctcctcctcctcttcctcctcgtcctcttcctccttctgccaggacccttcttccaggacccctgagaagcgcatagaatagcgtccaggactgtctgccccaggcacgctgaccactggctccactcccctgggcaagggtcgcccctgggctgctgcctcccagcgacacaggcaggacccagaagcctggtagaaagtgaccatgtgtggcaggtacaagaggccgagtgcggtcaacttgaagggacaggaagcctgcaggcagtgaccactctctaggctgtgctcagaggagaggccaaggggacacaggcaccagggccgtgggacacacctgggctaccccagctcctatcaggcaagcacctggagcctcactgtggaggggagactgtggccgccggggcgagggtgacacagggacacctgctggagaggggaacccagggctggctcatccactgcggccataaaacttcagcttttcctggatggtcactgtgcttggccagaggtcactggtgggaccagactctggccaggctttgagacatacgtgcctttccgtgtggtaggcctgaccttggaaggggaggccaagacctccaccccctcccctccgccctggcctgcgctgctgggaagtggatttggaggctctgttgctctctgcacagcccctcctggcctggcggcccttctggagcctgggagcagaggtgaggctggcatgggcacgaaatgtggaaatgctccacgcccccagggcttgcaggggaagcgaccgacgtaggtgtgtggccctcagggacagccccgggaagggaagtggccgatgtaggtgtgtggccctcagggacactcccaggaagggactgggctgcagaggacccgctcagggaagcccggcccagggcagggcaggtgctgaccctctgcatctctgcccatggtgtttcccccacctggagtgccctggccagtggctcaaatcctccatggcctcgagcctcccctttaggttccaatgccgtgctccacacagggtgctgtgtccagtgtcactgagtgaatgggagagtacatgagggataccatcgaggggagtctctgctgggccccacctgctccccaaccacacactcccccagacattcctctatcgagggcagtctcccccaggtcctacacagtcccccagccattcctctatggagggcagtctcccccaggccctatacagtcccccagccattcctctatcgagggcagtctcccccgggccccacacgcccccgcagccattcctctatcgagggcagtctcgcccgggccccacacgctcccctagacattcttctgggccccggggcatctgtgtggctgctgggacccccacaggggtggcgggtgtggctgcccctgagaatcatgctctgtagtgtcccgcccctggtgcagagaatcatgctctgtagtgtcctgcccctcgtgcagagtattatgctctgtagtgtccctcccctggtgcagaggatcatgctctgtagtgtcctgcccctggtgcagagaatcatgctctgtagtgttctccctggtgcagagaatcatgctctgtagtgtcctccccggtgcagagaatcatgctctgtagtgtcctcaccccggtgcagagaatcatgctctgtagtgtcctccccggtgcagagaatcatgctctgtagtgtcctccccccggtgcagagaatcatgctctgtagtgtcctgcccccagtgcagagaatcatgctctgtagtgtcctccccccggtgcagagaatcatgctctgtagtgtcctccctggtgcagagaatcatgctctgtagtgtcctccccccagtgcagagaatcatgctctgtagtgttctccccccagtgcagagaatcatgctctgtagtgttctctccccagtgcagagaatcatgctctgtagtgtcctccccccggtgcagagaatcatgctctgtagtgtcctccccctggtgcaggatccggaggggctgccaggccaggctctcagggaaggtctgcggatgcccaagtgcctgcacacctctgagggcccgtggcaagtgtagaaagcaagctctgggcagggctggctgctgccagcctcccacctccttggttcctcctttgtcctgcaggcttgtctcttccagtcttaacaatgctgctctcaaaagtctgaagccatagaatcccttcgaacagctgattcctctggagaatccaaaaacataactcaattcccaaaatttaactttttatacaacttgcaggacttgatgtggcgtatggagcactgaccgtccatgtggcaggactcagaggacgcgggcaacacagtgcccaggacagagaggccacagaggagcaaacgggcaggccgaggacagtcaagaccaaggggtgccaggcagggtgtgggcttcttgggcccacaatgacgggccctccatcgggatcctgtggggcaggccaggggcaggggcaggtggcctcataagcccttgaggaaggtgcagggggagttgctcccactccatggctgggggacaaggggaattgcatttccaagggggctgagccaagcatcctcaaaggcggcagttttggagcgagttggcaccataagcacagaagacagcaaacgttagaccctctcccaactgtggcggcctggagggagctcatgccacctcttctcgaagggagcgccctatgacctcctcaggtgaaaagacagagggcagtgctggcaagggcaccccagaccgcccccaccacaggtcggggagatgctgcaggtgcctacaggacactcagcttgcagtcatgggaggtcaccgccacccccctgcggggcctcctgagaactgaggccaacagagcgccctgcatgcccagaaatgcaacatgctctcccttccttcccctgcaggacccctcttcagtcactcactcccttccttcccctgcaggacccctcttcagtcactcattttggggcaattgaaggctttatttggaaaagacataccaaatttcctcagctgagcagatttttaagtagcaaattattatcaacccgaactgggaggccaagtcgtctgtagaccctgtgaggagctgggaggtcacttccctttcctctgggtggaaggggacgcctgagagccaggggcagaggaagaggcagaaaggagggaggggacagggagagaaactgcaggtggacagacaggcagggcctggagtcctggagctcagaggggacaggagcccacccacagggacagcccaactctgtcttgtctttttgcaaaatgctcaagctcaaagcccggctgaggctgctttaaattagatgctgcctcagcgggtccctctggagttgttggaaatctaattagccaggcagcctggcacaaatgtcctaattccctgacgctgggggacgcgagtgtctctttgctgctggggttcccggcctcagcctggcctttgcactctgcttgttttccaggatgatgcctatcagaaaccctaattgttttttcagaaacggctaattaattaggctcagcctcttgaaaggcacttaaaatactaacgacttgctaaaaaagggcaggacttgaaagcaaagccaaggtccaaagtgcccaccagcgtgaggggtctgctgcctccctgcggggaagccctggcagagccccttgctttgctgctcacagagtccaggacatgagagccgagcccatgcaccagtgactcacgccccggcacagatgagcccagagcccggaacagaggccgtagcaagaccccgggagcccagcctcccctacccctccagccccgctctgggccccaggaggctgacctccatggatgtcccagcaatctgtctctggcctctgggtgggtgtggccaatggagtcatccgggacacggaggtgggaagggactgggccctccttatcaggtctgagggtcaggggccctacatctgcttgtccctgttctcagcgccaggctcacctcatcccctgccccttgtcagagctccttctttgaccctccccaggggtccagctcacttgtttgttagtgacctcatcacagacaagttctcagccctcccatggggcggtcggtccttcaggcactggaaatacagcggtggacacagtggtggacctcccggtatgtcctctgttcgactgaacagtcgggttgcggggcctccaggagctctgtgagcccgtgctcaggtgcacacaacagaagtactccgctgacgcccacccctttcactcagctctcggttcagtcatcgccaagcaactgagagcctttgtgaagaggcttcctgccctcttcatcttccacagacacgctcttcttccttaagcccaggcatacacagacacagtgaatgcacacacaaagacacacaccagtgtgcacactgctctggaatccacaggttctataaatatctagaaatgatatctgaaagtgcattgttatatgcgctggtctgtgatggttacggtgatggtgattcctccttccggaggatggcgcggctgcagccagagggagattaggtggcggaggcttcgatgaccatttacattttacgagtacttattttgagtgtgtatttggaaaaattaaatttgtatatcaagcccatgatttcacagatatttttgcttaggtcaaaggctaaaacaggtatttaaatcaattcgtttatttaacttaaagaaaaatatgacgggttaaggttgggcttccccagaagtagatcccgaagcaggaatgggaggtgtcccagcgtggcggcgagttacttcaaactgggtggctttaagtaacgaggattcattccatctccgttctggagctggacatctgaaagcaagctctgggcagggctggctcctgtggaggctctgggagggggtgtggtttcttcctggtcccttccagcttctggtggctccaggccttccttggtgtccccggcttgcagccgcatcactccaatctctgcctctgttttccgtggcgtttttctccaaatctacctgtctcagcttctccatctcttatgagggcacccttcatgggatttgaggcccactctaatccatgatccttaccctaattacatctgcaaagaccttattccaaataaggccacattctgtggttatgggtggacatatttgggggccctgttcatcctacttaaggagggaaagttgtttattttggaggtgactctgagagcacagcagcaggtgagtgggaggtgagatgcccagtgaccagggcggccatcaggcaggccacggccaggcttctgggctcagcctcaccaggtcctcagctgcccagggctttctcacccaggacctgcctggagactgctccggggccatcaagtccccggcatgtcagcccaccctggccagaaacagcctggtcaaggggcacagggctgtggagttggggtgcccaggaaggggagaaccagcggggtccatgggccaggagagtccagccttgaagatgggggtgtgaaccacacagtcacggtctcaaaggcacagagctttgaaagcaaggtagtagctcctcaagccctctgggcacgccccaccagggtttgtgtgtggagttaatagggggcagttccaggagcacaccagaggggccggggcagccggaggggccagggcagtggagggctgggcagctggggcccaaccccagtggggactgagaggcctcgtgactgctgcctcagatccacctctgaagggcgggaagcctgggctctccctgtcccccacaaaccagggctggggtgtagctggggggtgtggagtgaggctggtgagaggtgcccgacgggagaagggccccggtccagcagctttccctgatcaaccaagggggatctattttgtttgtaaaaagctgattatcatagataaatgtgtctaattagtctcatttgctgacacacaagcctttaattgcaagttgaataattagacatatctgcatatgtaaatgatacagttataccctatgtcagtctttaacgtgattcctccagagacaaataattctatttcaggagagaatatgatatattaatttacatagacaaacaactttatttagaaccagcaactctcgtgtttgtttacataaagtaataactcgagaaatgggaaagatcgatgttgcagcaacatctggaggctcctaacctgcaggggagtccctggcagcctcccacgggagctgggtcttcctccgccctcctggggccccagtcctcccacgtggacagcagctctgggcctgggggtgggctggggcccaggccatggggtctccctcccctcttccccctccaccctccctcatgccatgcttcctcctctgccccttgtcctcgctgggtggcaggatgggtgagatgcccggtggccctgcaggcctgcagctggcccagtgcatgtgggtgtcccctctccatggctgtgccctgcatgctggcagagctgccaggggcagcttggagcaggagcagctggagcttgggtcctgattcaggcagtgctacagccggctccctgccaggccctgggtcagctgcccacctccccagtgggtgtcatgctcagcagcctcaggacagggctggggggctggctggtgccgcctgcctctgtcaggcccccggcctccactctggctgagtacatcgtctcctctctgagctgggcagggcagccactggcgacccctggcatcctccgggtctgactggcggggacagggctgcgaaagcatttggaggcctgacctggaaggaggaatgaggggccagctgagggcgtcccaggcagagccaggcttgcgatgcccagggtgcccggggcacagagtggcccggccgctcccacaccccttcccccttccctgggcccgtggtcacatgggtttcgctgggaggcagagcgtgaggaatttggctctggtggaatgaggacggctgcactccctgctttgcagagggcccgcacagcagcccgtcactgtggcaaccggctccgtgatgctggcaggagctgacatcgtcccaattcgcccctgtggtcccttttggtccccctcccctcgaccgccaggagccgctgtggatcgagttggccagcagagggcagcagagggctggcggggctggcggggctggcggggctggcggggctggcagtggacgccacactttggggtctccaggcccccaagtcttctggggaaagcagcagacaggcgacagccacagggatggggaggcgccatcactactgcaaccactgggggtagcccttggcccgtctgggggcatttcatctttggcagagctgaggggtccagcacgtgggcctctaaggaggggtctcccgcccaccgcccccagtgctactgtgaccgcggcggctcggccccgcctgcactcccaggttctcactcatgcagtcactcactcattcgctcgctcattcactcgctcattcactcattcattcactcgctcattcactcattcactcattcacacacactcatttgttcactcattccttcactcaatcatttacacactcatttgttcactcattcattcacatacttatttgttcacttattcattccttcattcactcattcattcacacatactcatttgttcactcatttccttattcactcattcacacatgcactcatttgttcactccttttttcattcattcattcacacacactcatttgttcactcattcattcacttattcacatacactcacgcatttgttcagtcactcattccttcattcactcactcattcacacacactcatttgttcactcacccattcacacacactcatttgtacactcacacacaatcatttgtttactcactcattcacattcactcattcatgcacacacttactgattcatgcacacacttatttgttcactcactcttgttcactcattcatttctttcactcattcactcacacacattcactcattcatggacacactgattcatacacacagttgttcactcactcattgcttcattcactcgttcactcacattcattcacacattcatttgatcagtcattcattcatgcaatcatttgttcactcattccttcactcattcattcacacactcatttgttcactcctttcttcactcattcattcacacactcatttgttcactcattccttcactcaatcattcacacactcatttgttcactcactcattccttcattcactcattcacacactcatttgttcactcgctaattcaatcattcattcacacacactcatttgtttactcactcatttgttcacccactcattcctttagtcactcattcattcacacactcacttgtttgctcactcattccttcacacacatgcactcacttgttcactcactcatccacacacattcattaatttatttacacacactcactcactcatttgtttactcagtcactcctttgtacacagggaaagagtaaggtacctttccctcctgttcagctgctgccagaagcagtgtccagttctcctggtctaagcaggactcaaggtcctgcagcagctcagcagcccctggagctgcagcgtctcctttgttctctctgaagggggcatgccttggccccaacattcttgtccttcattttttgaagtttcttccccctctctcctggctaatctcatatcttaactaccaatataagacaaaatatttctgtgactttctttccaattcaataaatccatctggtgagaagagaaaaaaatgcaagaagagaagaggcaatgccgcaccccaaaccctgtcagtcactcacactgaggacattttcacgaggcgttaatgggtgatgtttgaattctggttgccagcacagatcagggcaaagctcttgtaaaactctattaaagtctgtggatccagctgagacacagggctgggaaacaaagttaactgttctccctcctgagcggcttgtggttcaggaaacacccccaagcccctgccttgggggatctgtgggtgagagggaagcatatttggatacagcttcaagagagaggtccgactgctctgtgtgtacacgtgtgtgtggattgccctgtgtgcaccagctctgtgagtgcctgcatgggagtgtgtacacacctgtgctctgtgtgcatcctcaaacacaccacaccaacaggggtctggcattgcctccctacggtgctcatggtgaagtcctcggactccaagcccctcttctgcgccagcagtgaccaggctgtggtcagcatggcctgttggtggcctttgacttcctctgttggcagatggcttgaggccccccagttcagggccacaggtgacttccccctttcccaggtggtggggccctgtaggcttgaccagccccaggctccagagcgcacagaggtggctgtccacagagcgcgggaggcatgggagggtgtgctgctgcctgctggtcatccagctcctcgcccattaaggagcccgctttcccctttgggaggccacaggggctggcgaaggcccttcagctgtggctcaggtgggctgggcaccactgcaggagaagcctcctccagatgggaggaggtaggaggtgcctcctccagatgggaggaggtaggaggtgcctcctccaggatcaaccccagctccttagcaccagcgaacagacacagtagacacacgcaggaacaagcacatgtcccaggctgcaccgtctgtgtctttccctttttggggtccttgcatttcacccttacctggttctggattcagcttttaagggcacactgattggcagccaggccactgtgagcgctggctccaaatgtccttttgttttgttttgttttgttttgttttttgagatggaatctctgtctgtcatccagcctggagtgcagtggtatgatcttcgctcacctcaacctccgtctcccggtttgagtaattctcgtgccttagcctccccagtagctgggattacaggtgtgcaccaccatgcccagctagtttttttgtatttctagtagagacgggttttcaccatgttggccaggctgctctggaactcttggcctcaagtgatctgcccacctcaatctcccacagtgctgggattataggtgtgagccactgcgcccggcttccaaatgtccttgacaacggccacagcatagcctgcagccaaggggcgagggctgatcgcgagggcctgtggtcattcctccaccttcggtgccctgcctgggcacccccgtgcagctaccacgtggggaaggcacttggcctcttccctcatctgcagactcagccaacttctggggctccctcggcagttggggctaactcagtgggtcaggtggaccccggctgtgcgtgcagcccccgagagggtcagcaggggcgcggaggcccccttggctctgctttgttctgcctgcggctccggttggtttgtgatatctttgattccatctcttgcccccatgtgaccccatcgtctgcctggccgggggctcccttgttggagtgtggggcgagcccccacccgtgtgggaagaggagaaggccaggctctaagccccactcagctcctcgtcctcggaggggtcctggccctaagagggcttgttggggtcacgcaagctcacaatggctgtggtcctcagcaggtgggacaatcgggctgttttccgatggtgtttggcagaaagtgggagtcaaagcttagaaaagccctgacagaaatggttccctgaggctggcgggagagtggcactcgggatattaaaacagcgaagtcggtcctggccaattatcagccagctggccttgctccggcgcccagagctcacagggtgagtcaccatctgcggctgagcatccctgttcagtgagggagacagatcctgtcctggtccctcctcccagctgtttgtggcctccctcctcaggctgcctgggaagctgtttcagaaccttccagtcccctcctggctggccctggggctctgtggaagtcctgcttcccccagcagtgcctggccctttgtccccgacccaggaaaaggtgaagtgggggtacttcctgtgcatgacacgcccccttcccttctcccagcctcctgcctcggggctctggcaagaaagagggcctgagctgcaggagaagggcttccttgagcaggaagaagccctggcccagggcagggtgcccggaaggcggaaggatcccagcccaagccacagccccaccagatgggtgggggccttcatcacaagaaagatcagagagttgccctctgaagccttcgcagtggccctgacacaggctgccagggatccgtcactcaagggaaggccctgggggtggggggctctggcaggggtgaccacagtggttaggggcctgggtgagaaaagggacccctgatgtcccatcagggccgggaggggaactggaggacctcctggcactccctggcccctcctctggtgcctagcaccttccagtgcttttcccaagaggaagggagagcctggtttcattactaagccctccatgtcctgtccgtgtccgtgtcctgtttgtgtctgcgtcctgtctgtgtccatgtcctgtctgtgtccgtgtcctgtccgtgtcctgtctgtgtcctgtccgtgtcctgtccatgtccacgtcctgtctgtgtcctctccgtgtccgtgtcctgtccgtgtctgtgtccatgtcctattcatgtccgtgtcctgtccgtgtcctgcctgtgtccgtgtctgtgtcctgtccgtgtcctgtctgtgtccgtgtcctgtccatatctgtgtccgtgtcctgtccatatctgtgtccgtgtccgagtccgtgtctgtgtctgtgtccatgtccatgtcctgtgtccgcgtctgtgtctgtgtccatgtccatgtcctgtctgtgtccatgtctatgtcctgtccgtgtcctgtcagtgtcctgtctatgtcttgtccataacctgtctgtgtccgtgtcctgtccatgtctgtgtcctgtctgtgtcctgtctgtgtccgtgtcctgtccatgtccatgtcctgtccgtgtctatgtcttgtctgtgtccatgtcctgtccatgtctgtgtccgagtcctgtccatgtccatgtccatgtcctgtccgtgtctgtgtccatgtccgtgtcctgtccgtgtctgtgtctgtgtcttgtccatgtccgtgtcctgtccatgtcctgtctgtgtccgtgtcctgtccatgtccgtgtcctgtccgtgtccgtgtccatgtccatgtcctgtccatgtccgtgtcctgtccgtgtctgtgtccatgtccgtgtcctgtccatgtccgtgtcctgtttgtgtcctgtctgtgtccgtgtcctgtttgtgtcctgtctgtgttcgtgtcctgtccatgtccatgtcctgtccgtgtctgtgtccatgtccttgtcctgtccatgtctgtgtcctgtccatgtctgtgtcctgtctgtgttcgtgtcctgtccatgtccgtgtcctgtgttcgtgtcctgtccatgtccgtgtcctgtctgtgttcgtgtcctgtccatgtccgtgtcctgtctgtgtccatgtcctgtctatgtccgtgtcctgtccgtgttcttcttcaccctgatgtgggggagctctttcggcctttcctttactgcagcccgaaaaggaaaaaagagggaaaagcaggcacatttcttgaccagaaaaaataaacaaaaacaaaagccccttgtgctccatgggggagagcgtgaagcccccgagcgccactgcccccggtcccaggaggctcaaagtcctctctgctcagagagccgggggtgcttggccccaccctgtcccccttcccagccacttggtatttacatgtacagctggaccccgagagaatccccattctaagcccaacagtacattctggggcgttttaaagaagataagaaagtagctcagaggtttgccaggctgcctcattcctgggatttttagtgtgagccttggagctggtgggcttgaatgtggggttcctgcagttgggtccccctgacgcccccggcccttccctgtcactccggggtgtaattaggagtgtcccccaggattgagggagtgtggtctcgagctggttggactcaaggctgttctacttttttctccaagttttgtttattgtggtaaaacacacataaaattttatcatctcagccatttttaatgaacagttcaatgacactaaggacattcccatggttgtgccatcaccactgtccatctccagaacgcctttcaccttcccaaacccaggctctgtccccattaaacagctccccacgcctcctcccccagcccccggcctcccctttctactttctgtctctacaaatgtggcagctctgggaccgcgtgtgagtggacacctacagtattgtcctctgcgactggctgatttcattagcatgtcctcaagcttcatccacgttgtagcctccgtcacaatttccctcctttttaaaggctgaataatattccattgtgtggatagacacattctgtctattcattcatctctcaatggatacggttgcttccatgttttagctattatgaacaatgctgctgcaaacatgggtataaagtgtctctttgagatcctgctttcagttcttttgcgggtgcactcagccgtggaatggccggatcacatggtcattctgagttttgttttgttttgttttgtttttttgtttttgttttttttgagacagagtcttgctctgtcacccaggctggagtgcagtggcgcgatctcggctcactgcaacctccgtctgttgggttcaagtgattcttctctgtcagcctccccaatagctgggattacaggtgccggccaccacacctggctaatttttgtatttttagtagagacggggtttcaccatgttggctgggctggtctcgtactcttgaccttgggatccgcctgccttggcctcccaaagtgctgggattacaggcatgagccactgtgtccggcccattctgagttttttgagggagtgccatcctgttttccacagtggaggcaccattttacatcccccaccagccgtgcacgagggttccagtttctccacatcctcaccaacatttcttattttcagcttcttcttacggtagccatcccagcgggtgtgaggcgcatcgcactgtggttctgatttgcgttttcctcatggttagcgatgttgtttcacgtgcctattggccgtgtgtgtgtctttttggagaaacacttagccatgccctccatgcatttttgagttgggatttttgctcttattgagttttaggagttctctgtacattttggatgttcattccttatcagatatatgatttgcgaatattttctcctgttttctgggttgcctttgattctgctgagattgtctgttaaggtgaataatttaaagttttcctgaagtccagtgtgtctgttttttcttttattgcctgtgcctctggtgtcatatccagggaaccgttgtccaatccagggtcatgaagctttgtgaggctgttctactttatttccagggagctgcacaacctggggtcttctctggggccgtgggctctgagggccgaaggccacgttccccgggtgttggtgtggacctcggcacggcccccactgacctgcatgggccgaggtcctgcaagagaacgggctccatttgcgtctgagggccaggatgcctgcactggggatcacgctgtgcttcggatggagcctccaatctcggggatgccattttaccctggaggccatcgggcttcatgccccacgggcattgtatcggcttccgtgtggccccgagagcagggcaatccgagggcaaggccaagggagtggtgagcgtggcctgcagggcggagccaggcgaagtggggtggggctggaggccgcccgggctctggttggtgggcagaggcaggaagccactggtagctcagcacagcacagggctgatgtcaggggcggcacccagccaagacccagggagctgggtgctttcagcttctctttgccagtcagctgctatgagggcctaagcagtccccatggcttcctgctgagacacctaggtcccccatgacttcctgctgggacagagaccccctctgagaggcagatgccaaccctgagcaggcccccgaggttccctcccattctcctggtaccagggctgggagggcagggttccggcctgtggcactcaggctggtgatgtcagaatacgctgcgggtgccctggactcctgctccggttccctgaggggtcatgaccttgagtactcatgagagacagcttctcacactcacttccgcgtgccttccccaaacgcggagctgcctcctggtgcagcctgaggcattttctcatggtctgtccagaacagtttctgggtcagattcagttttcagaagcagaagccacagcattcgtcctctgctccgtccacacgcggcacccaccccaaggaggcggcacagcctggcgccagccacagggctcagcagagagaggggaattaaacagccactggctgggaaaggacgtttcaagggcgtaccacgcggccaattcaatggaaaaccaaactgcaagcgggaatgtgcatcagaaccagcccggagccagcaggcgttgctggagcagggtggtgggaggtggcgttccaggcctggttgcactccggtttgtccttcaggtgcgtgaggccgcctctgccatggctctaggcacgtccctgccagtgggggctccagcataatccctcgtcctgcagacacagcaccccccaccccccgcaggaagtgctgcatccggctgcctgggccgtggtgcccctggggtcagggacgtggcaggtgcggaggccgtgctcggtgccaggctctgagaggtgacattgcctcacctgggtcgagctccagccaccgaggacgatggaatgactggggtgtcttccgggagccgtttgattgtctctggagaatcagccgaggctggtgccgccttggagcaaaaacaggggaaatgagactccacaccttctgccaagactttaattctcttccaagcttcagaactgaaataattttagaagtcattgttcatcagctggctctgttttccacagcttaaaaatgtcctgaatggttgtggagtcagggtgctaaaataacaacgcaaaccgggaggaggccgggatgcagacagaaagagaggacccggcctgaaccaagcactggccacggaggctcgtggcagcgctgaggggaggacggtagcctcctgcctgtggctgccggggctcacatctgagcgccactggcttaccaggactccgactgggcttgccaggcagcggcccttgggaaccggggacgtccaggcagccaaggccttgctctcagccatgcatgccactggccttcaacaggctttccttaggtcggcattttaaacaaaccccagggtgggtcctggtgaggatgctctgttctctgtgctgtcctctaactgcagggacgctgggtccgcagcttccatgggctgggcggctctggtttgggccggggtggatcctggctgtgcattcgtggacatcagcttctctagggtttgggatgggggatggtttatctcaaacccccaacccctcactggacctcaggcctgctgcaaagcagaggctagggttggctttaactcgctgccccatgcaggctgcggacactccaggagatgctctgttttcccgcccagcagtcaccatcacggagatggaggcctgaggtgcggtcttttccccctgcttctcttcctcttgtgggaatcactgcaaatgagaccacagcagcctgggccttgccagcagcaaatgctcagtggtagagccaggcggccctcttctcctgaaagccttgtcctgggtcaggcccgggaagaaaggatggggacaggaaaggacgaggctgcggctgccgtcccccagggcagccacgcctgggcagcccccggacagagcctgtttcagccctcagacttcacggggcaagatcacagccctctcacctggcttcatatggcagtgccacagaggcccctccctgactgctccaggctctccctgacccctccctgacctctctagggatctcgtggggacccacaggccatacgacattctgagggcctggaacggtgacttccctgacacttttctgttattttaagtaaaataatacatgctcaccaccaaggccatttctggttgaatttttttggctcagattagataatgctaaattttatgctaatttaaagtgtcaaacaagaggccaagccgcggttctccgtggtcccctgctgcaccaggttatgtaaccgtgtttctcctgctcgtttgcctggcgccgcccaggcccgtgtcttttctattttgggtgtagacggaggtccttctgtctgagctttggagcacaagggtctgggcgtccttcagttaggggaagggctttgatccctgagtgcctgcgaccttgtggggacagcgtgatcatgaaatatggaattcaaaggttcccaggtttgagatgttgacacgtgagtactttgccttcaccagtcctggaaagacctggtgggggaagaggacaatgacaaagttgctgtgtggatgggcggcgcgtgcagaaggcagggcctcgggctgcagggggatgtgcccctgtctgcctcctgcctcgagtggtcaggccggtgctgggacatacccacttgccccaccccaacccggaaggacagtccttgtgccgggcccttcccacgggagcatctgtgggatgcagagcctgccagcaccggcatgtccacctggggccactcagcgttttgtttttgatgtcaaggtgaatgcccctgtgtaggttcagcaaaatgaaggactgtatattaagtgtgttacacacacatgaatgaatgcctggacttgtagaatgaggaaactcaccaagcacctacaaggacctggagaaagagagaaagaggtgggagggaggaggggtgggccgagacctcagcccgtggagctcatggtgggtgaggggaggagagatgcttaggagaacaaaagccagcctggctggtggtgaggtcacggccaggggagcacccagtagaaggggacagcagctataaacactgaggaccaggaagggctccctgcaaaggggcagtgtggccaggactggagggaggcaggggcgtcgagacccgcgggggcgtcgagacccccgtgtgcctgagcacggcctatgcctgccctgtggctacgatgagaaacatcccacgtgggctgccagtggacgaattgccagcacctgccatctcctgacatcactctccttcgaggctcactcttcttcactcagagttgctcacggattcgcctgttccctcattcactcattggttcagccaccaaattactcattcattcattcattcactcacttattcatgcgttgaacacctggctgacgttttggggagcagggttgggatgtgcagcaccccacagcgctttgtggagctctgatggcctcacactccttgaccaccaagcaccagcccctgggccgcgagccagccaggctgttgccgtgtgtgagacccagaggcagaggtgggagctgggccccacgctgaattcatgggcttttgtctgcctctgcccacctgtgtctgtttattcacccgtcccctccctgcaccccagtccccacccccacagcagcaaaggcagccccagtattgacacccagcagtggggcctgcaccccagtccgcacccccacagcagcaaaggcagccccagcattgacacccagcagtggggcctgcaccccagtccccacccccacagcagcaaaggcagccccggcattgacacccagcagtggggcctgcaccccagtccccacccccacagcagcaaaggcagccccggcattgacacccagcagtggggcctgcaccccagtccccacccccacagcagcaaagtcagccccagcattgacacccagcagtgggggccgaacagaccccagacaaggaggggccaccaggaagcctctgccaacaacagccccactaggcctcccgcttcctgtctgccctgccagccctggtcaggatagcattgagggtgagggcatcgggggccatggccaggatgggaggaggcagcgctgccacccaccacccccggctctggggagctggactcggtgcccatcccactgaaaccatctgctgtcctggagcccagagatgcccgggcctgccgaggtgggcagcaagaaggtgcgatgaggtgtttctacagaaatagcaggctggccatcccacagacagcacaaggaccttccccctttcctcccagagaggaatctgcatgtctcctccctcccagagaaaacaggagctccttgtccaagtcattcagggattttccaagggagagggagtttttttattgtttgtttgtttgttttcagagtcttgctgtgtcactgaggctggagtggagtgcaacggcatgatcttggctcactgcaacctctgcctccctggttcaagtgatttttctgctcagcctcctgagtagctgggattacaggtgcacaccaccacgcccagctaatttttgtatttttagtagagatagggttttgccatattggccaatctggtctcgaactcctgacctcaggtgatcagcttgccttggcctcccaaagtgctgggattacaggcgtgagccaccgtgcctggccgggagggagtttttaaagaggtcagacctcttcctgattttggggtgcagagccagcaccatccaaggagatgctgcggggttgggagggaggaccgggtccatgctccccagtggaggtgccggctctgggagacacagggcccctcgccctgcatgcatgcacatgcggcttctcagggcagctggacttgctctgttcatgagctcttggccttctgaaactgctagttagaggccagttagaatgcttggcctagagaggcccctgttcccccatcggagctgagctgccatctctcatcagaggctcgtgtcagaaagccctggtggaggaaagccaacacttgggaagcacagggaggcaggctggacccggcgtccttgcgggctgttggcaacaccgtctggagagggaccgggccctgtgcccgccagtccccagggcggggcggcctgagctggcctggtctgctgtccttgggatcaggccaggactcagctctgtgcctgggggccctctccaaggtgctgacgacaccatgttccagccttcactcctgccagcctgggagaccttcgagcggctttaacaaaccccatcgcaactgggcttgccttgaacacagccctggacaatggctctgtctgggtgtctttgggaatacacgtctttttactaacttcagtcagaccttcagccttccttgatccagcctctctgttcttcccctgctcctcctccccaccccaccctccctcccacagcaattccccaaaggagcagaggcagagggagagccttcctctgcttgtcccttgagaagaggatgtggaaacgtcagagattctcctgagagttgcaggcaggcagggaggacagacgtacttgggacacttcctgctgtgattccaaactctgctgacccaaggaggaggtctgcatgccctgcgctgttgactgtgtgacactgtgtttatgctgaaatatggagtcccaggaggctgggccatttccctctgtttcttttcttttctttttctttctttctttctttttttttttttttaacacagggtctcactatattgcccaggctggtcttgaactcccgggctcaagtgatcctcctgcctcggcctcccacagtgttggattacacgtgtcagccaatacgcctggcccctatttcctttcccacttaatgaaacaaaatatttagctggataacaattatttcactttctgaagtcaacacgagtctatttgcaaatacctagaattcattctagtagcaggaggcaaaactacgagcctgtgttggtcagcgtggctctgctgctcggcttttcatgccacattagatgggcatctgcccagtactgtgtccccctttgcccagcattcagcccttgtcattgagaggggacagatgcaggtggaggatgagagcaggctgccagagctgagtgtgggcaggggtggaggcaacctgaagtagacactctgctgggtgctcaagctgccaaaccctgctggtaaaacagagatgcctaaaggatttggagccagacagggaggctgagtggggggaaacagcccagcatggtgggctaggtcatgggccctggacaactcgtgtctggtggagtgctgactctgcagtgagggtgtgaccttggggagctgagaagattgaagagctcatttttgaaccctcattcctttcttggtttcctcatctgtaaaggggtcatgttactagggtctcatgtaaactctggccccttggtcagcactcagcttcacaggtgttgcctcggtccccagctctcaggtgcccgggctggtgagagggcactgcgccaggcgcagcagctctgcaaaggtggtgacccaggacacctacccttctctgcagctcagcccgtgaatttgcaccacaaatttcaatgaagtcatcttaagaagatctcactttgttccttcttccagaggcgggtgggtgggaggcccagctcccctttcagagaggaccttcctcacatgctaccctgtccagccccacgccgttttcggtgacaggggcctggacagatccctggttcagagcccaccccactggaagtacaggagactgagtcagaggccagtcaggccggatgagatcaacagtgatttgcctccaagccctgattcctccctgaggaatgctcctgagaaaacgctggctcccactcacagctggagcttcaaaggttggtctagcactgaccgtgtggacccacgtgcttctgtctggaaaagccccacaagccccgccccataagaccccgcccctcttagctccgcccacaaggccacttcccagctccgcccatctcgcgtctgtaccctacaggctctgcctggttccaccccaccgcttctgccacccactctaaggacccgctcctccccgcccccgcccccaaagccgctcctctcacggcccccgaccccgcaggcaccgactgttctcagccccgcccctcgaggccccgccccgcggcttcccgccggggattgcggctgcgcctctgaccctccgctccgggctccgggctcaggtcccacacctgcccgcgcccccaggccccgccgtcccccagagcctgcagcgggcgccgcgcaggccgccgggctcctccgggtgggccgggctcgggcttttggagccgcgcgcccaccgacccctcccacgggcggcggggggagagcccacccagaggcgcagcggggccggtggtgtttcccgccctcccagggggccgcgggtccgggggcagcagcggggcgcggggcggagggaggcccggcgggaacgggcgccccctttgcacccacagccgtggaacgccgaggtctcagctcccctacggcgcgcgccccgagaccccgcaagggcagtgctggggacgcggggccgagactcgaggacgcccgaggccgggacggggtgtgggggcgtcccccaggctcccgggtcccagtgcaggggctcgcggtcaggaggttaggtggatgagtgaaggggaaaagcgcggttctagctgcctgctcaggcttggggcgatgtgaacgtcggggtttgcccctcgaccccccaccagaacgcagatacttctcagcaaagaggagcttggggcagcccactccccacagaggaagggaggggcccgctccacggaggacctggggggctggaggaacaggcacccccatgccaggcaggacccgagggatcggtacagggcacggggagaggggcctgggggaagctgttgaccccgtgatcctttttacaaacttgtaaatcagagagaaattaattcagatgctgcaattttttctgataaacctcgaaacatgtaaatatcaaaccctcttccttcagtcactaaaacaaatggaaaacacatttattagcatagagatgagtttaatcaaatcagcctgagtgcaaattagccacaggaaatgcaatgagctgggaattaattagcagcgtaatgatgataaggtggcctgctgactgcctggaggccgcctctccccacggttgccgggctcctggcagctcagcttttcctttgcaagaggccctgagcggggaccactggacagccccctggaccccttggagagctgcagaggagaggcttcagggggatgcctcccttggggggcaggtctgtgtgttctaggggagcccagcctaccctcccccggggtgctcgtggcttcctctctaggaggccagggatggggaatgaggccttgggatggtttgaggccttcgggagcccaggagagggcctggccccagggcagtccggcccagagggggctgcctgctctgaaggaggggcttcccaatgtagaggtcccagtggccctgggtcccagctgggggtggactttggtgacaggcagcccccacctgaactggaggagcctcatcgagggtcctaaatgatactacagatgagacgtgcatttcaaatctgagggcaaggctgggaccctgggccctggcacgtgggactctggaatccacctgagtgcccattcctgcaggaattcctgagattgcttggcaccttgcgggttgtggctggtactgaggtgagcggttgaaatgtcccccaggactggtcagctgccctcccagttgggctgggtgcccaagtgttcacagggctcttgggaggacctgggtggccttgtgcaccctgggggctgttggtctaagggtgcaggggctccctggaggtcgggagctctccctggggccagctgcagccctgcgatgtgccctcccctccctgcacaggctggacacacagggacacttcttccccggaggcttctccagtccccaggaatctgtcccccacctgtcatcaggaaacttcagaagatcaggaatttttttctggagctgcattttgcacagtttcctctttttaagggaggaggctcggagtctccggtcaccacagccgatttccctgaagcctccgcagggggccacccccacagagttttatatgctaacagttcttaaattcggagtcctgtgggaaggtgggaaagttaggtatatacactttttaatgtttttgtttttgtttttttgttctactcaaaaagtcattggtacctaggtaacacacttaaagaaaggcacactttgtggctgggcacagtggcttacacctgcaatcccggcattaggggaggccgaggcgggccagtctcgcttgagcccaggaatttgagaccagactgagtaacatagtgagaccgcatctctactaagaaaaaaaaggttagccaggcgtggtggtgcgcacctgtggacccagccacttgggaggctcaggtgggaggatcacttgtacccaggtggttgaggctgcagtgagccgtgatcaggccactgatctccagcctgggtgacagagtgagaccccgtctcaaaataataacaataaaataaaggcacattttgagaacagaagatgtttctgagtttcacatgttgccatatcctgtggacagcttatagtgggacaccagggcagatattgaagtttgatgtaacttgtgaatggcttaaaaagtggtaatttcttgggatcagaaagctgattaaggcaaggctgagaggagtcagcttgcctctcttccacagcgtccactgggacagttcaaccctatctgcgggaccaatctccaagacgtgagttggcacagccatcagttcgtctccatggatgtctccacgggcaacctgagctcccacgtggcatggtgatggttctgaaagtgggtgttccaggagacaggaagtgccagttccttaaggcctgggcctgtggtaaaatatgcataacacgatttaccttattagccattttaagtggtattgagtctgttcataatgttgtgcggtcatcacgactgtccacctccagaactctcttcatcttgtaaaactgaaactctgtccgaattaaacaactcccatcccccctccctcaagcctcagcacccaccgttctactttctgtctatgaatttgactaagtacctcacaccagtggaatcgtatagtattcgcctttttgcgactgtcttatttcactttgtatcaagtcctcaaatttcatccacgttgtagcatgggtaaatttccttcctttttaaaggcggaataatattccattgcgtggatagaccatattttgtatagtcgttcatccttcaatggatatggggttcatattagctgttatgaacagtgctgctatgaacatgggttcacagcatgcacatctgctataggttatctttgagaccctgctttcaattcttttgggggtgcactcagaagtggaatggctggatcacgtggtcattctatttggagttttttgagggagtgccatcctgttttccacagtggtggcaccattttacacccccaccagccatgcacgagggttcgtttctccacatcctcaccaacatttgttattttcggttttttctcacagtagccatcccagtgggtgtgaggcgcatcgcactgtggttctgatttgcattttcctcgtggttagcgatgtttcatgtgcttattggccatgtgtatgtgttctttgtagaaatgtttatccaagtcctttgcccatttctgagttaggttttttgttgttgttgagttttagaagtcctctgtatattatggatattaatccctaatcagatatatgatttgcaaatattttctcccattttctgggttgccttttttccctgttaatattgtcttttggctgggcatattaactctgcctgtaatcccagcactttgggaggccaaggcaggaggatcacttgagggtcaacaacctgggcaacatagtgagaccctgtctctacaaaaacataaaataaaaaacagcctggcacagtgctccatgcctgtagtcctagcttcttggggggctgaggcgtgaggatcacttgagcctaggagttcaaggttgcagtgagctgtaattgtgccactgcactccagcctgggcaacagagcgagaccctggctcttaaaaaaaatagtcttttggtacaaaaatatttattttttacgaagtccaatttgtctgtttttttcttttgttgcctgtgcctttgatgttgtatccaaggaatcattgccacatctaatatcatgaagctcttgccctgtgtttgtcgtagttcatttgtgtggctataaaggaatacctgaggctgggtcacttatagagaagagaggtctgtttggctcatggttctgcaagctgcacaggaagcatggcaccagcatctgcttctggcaagggcctcaggaagcttccgctcatggtgaaaggtgaaggggaagcaagggagctagtgcacagagatcagacagcgagagcatggggagcaagagaggggagcaggttcttttcaacaatcagttcttgtgggaactaagagtgagaactcactcccccgagaatagcaccaaactgttcatgaatgatccgccccacaacccaaataccttcaaccaggccccacctccgacactggggatcagatccccacaggaggcttggcagggccaaaccaaccaaatccaaccacagcagttttcttctaaaagtttgtttatgttgaacatttaggcctttgatccattttagttagtttttgtatatcttgttgggtaagggtccaacatcattcttttgcatgtggatgtccagttttcttagaaacacttgttgaaaggactgtcctttccccatcaaatggtcttggcaccattgtaaaaaaatcatttaaccatgtatgtgagtgtttatttctgggctctccattctattttatttggtctatatgtctgattttatgtcagtaccatattactttgattacagtagctttgtagcaagttttgaaatcaggaagtgtgagttctccagctctgttttttttttctttttcaaagttgcttcggttattcagtgttccttgagattccatagaaattttaggatgggtttttctatttctgcaaaatacgtcactgagattttgatagggattacattaaatctgtatattgctttggatagtattgccattctcacaatattaagtcaatacatgaacatgggatgtctttccatttatttatctcttctttaatttctttcagcaatattttgtagtttttattgtatgtctttcatctcataggttaggttaattcttagtattttattcttttttatgctattatatgtggaattgttttcttaatttccttttcagattgcttgttagtgtatagaaatacaactgatttttatctgttgactttccatcttcttactttgctgaattcatttattagttcctgcagtttttgtgtgtgtcatatttagtgtattttacatctgcaaacagagactttttttaagttctttctttctaatttggatgtcatttatttttcttgtctaatcactggataaaacatccagtactatctcaaatagaagtagtgaaagcaggcatccttcccttcttcctgatattagacaaaaagctttcagtatttcaccactgaatatgatgttctttgtgggtttctgatacatgtatttcattatgttgacatagtttcatagtttgttgaatggtttttatcatgaaaggatattggcttttgtcaaatgcttcttctgcatcaattaagatgatcatgtggtttttttccttcattctgtaaatgtgtattacattgattgattttcatatgttgaaccatccttgcattccaggaataaatcccacttggtcctggggcataatccttttaatatactgctgaatttgatttgctagtattttattgaggatttttgcatcagtgtttattaaaaatattggtctgtatttcataccattgtggtcagagaagttattttgtatgatatctatctttttaagatctattgaaatttaatttgtaaactaacatagtctatcttagaaattgtttcatgtgcacttaaggatgtgtaagctgttgctgttgggtagaatgttctgtatatgtctgttatatcttgtgggtttattgtgttgtttaactcttctgtttccttatttatcttttgtatgattattctatctattatagagagaggatattgaggtctctaactgttactgtattaatagaactgtctatttcttccttcaactctgtcagttttttgcttcatacattttgattatctgttgttaggtgtataaatgtttataatcattatatcttcttgctgtgttgaaccttctattaatatatgatgcccttgtctttgctcttctttgtctctttttaaattgtaaactctattttgtctgatattactatagctacccctactctgtttggttgctatttgcatggaatatcttttccatctttttactttcaatctatttgtgtctttggatctagagtgagtcttttgaagatagcatatagttggatcatatgtttttattcattctttcaatctgtgtcttttgactggagtcaaacccatttatacttaaagtaattactgatgaggaaggactggcttctgtcattttgctatgttttctatatgccttagagtttttgtcctgcatttcctacattagtgtcttttgtgtttagttcatattttagtgaaatgtttaaatttctcatttctttttgtatacagtctatagctattttccttgtggttaccatggcattacatttagcatattaaatttctaatttggattcatagcaccttaactttgataacatacacaaactctgcttctttatagctctgtccctacccttttcagttattaatgtcacaaaattaaatctaaactaataattcttttaagtgcattagtctcaaattatgtagaaaacaaaatgtggaattacaaaccaaatttacagtagtgctagttttgactaataactttttaaaaaagtattagtatcttaaatcatataggaaacaaaattgcagttacaaaccactgtggcaataatgctaacttttataattggccatgtatttgtttttattgagacctttatttcttcatacagcttctagttactgtctagtgtcctttatttcatcttgcaggactccctttagcatttcttacatggaaggtctagtgataacaaactccctcagcttttgtttatctgggaatgtcttagtttctccctcactcttgaaagacagttttgacagatataggattcttgtttgtttgttttaaattttattttagcacttggaatatattggcccactgtcatctggcctccaaagtgtctgatgaaaaactggcttgcaatctaatagaggatcctttgtatgtgacaaatttcttctctcttggtgctttcaagattccagagtcctcctggaggtggagtgtggagggcacatgtgggtgcacacagtgggccacccagacccctctcagcacaggggtttgctagcagctcacagctgagtctctttcccagggccatccctccttagggtcagcctccatcccaggacatggagccctgccccctacctcaactgggacaaccctctcccctgccctgccctccaacaaagggtactgccagaaagaacctccctatactggattgaatggtgtccaccaaaatcgatgagcttcccggaacttcggaatgtgaccttattaggaaataaggcctttgaagaaatacttagttaagatgttgtactgaagtgtatgggccctgatccaatccctggtgtccttatagggagacaagagacacacagccacagaggacaaggccatatgagatggaggcagagactggagagatgccgccacaagccaaggatgtgtggggccaccaggagctgggggaggtgaggaacagattctccagagagcctgtggagggaaccagcctaccaacaccttggtgctgggcttctggcctcagaactcagacagtgaatctgtgttgtttgaagcctcctagtttggtccttggttacagcagccccaggacactcagtccccagcagcccctgcagcaaatctcagtgtctctccccccatctgtttgcagaggccccatcaacgaacaaatgcagacaactcttcctggagttttgcattaaagacaagaagctgggggcacagcgagggggacatgaggtcaaggcgctgctgctttgttaggtaggggagattgagcatgtttgtatcctgatgggaatggacaagcagcaggagcatctgatggcacagcaaccagggggccaccccttaaggacaggtgggccggcttgccttggagcatgggtgcttgctcacaggctcggggcaaggcacagatgcgggaggcacagacgcggcagtgggagcagctgggtccatcttctcccagctctgggcacaggtgggaggcacagtgcgtgctttccctgcaggcttcctgtgcttcgccccgagccatctccccaggtctgagttcctctgctggtccaggagggtctcagtgcggtgggacaaactcgttccattggtggatggagacacacccagtgtggacagaggctgcaagcatcagagggcgtgtccatgcggcagtattggtgtcatggccataaggttggcacttcctacagactccggccttgcattttcagcagctggagctgttcacagcatccttctcacaggagttttgggagcacaaccaggtggggtatgcttgaaagccttagagtgaggaccagcacacccaccctcctggtgtcccatgcaaagctgctgaaggggctgctgtggctgaaatctgagctctgggtggtgcctgcaggagcccaagcagctccagagggagccccattccacttgaccccttttccttatggcagattcagcttccctggggtgaaatcgaggggcatttcccagttatctccaggagtatgaaatttccctcttgtttctgcccacctgaggggctgcacttggaccctgccatgggaagaggtctgttcctctctgcctcctgggggaccccctccttgtgtgagtcccctctgaagccctgcagaacctggtctgggtcctgaacagtcctgccgaggcctggcctgttggacacagatgctcaaaatctactcagagcatgctggcccctgtggagtggttcctgttcctggggggcttaagtgaatgagggcgagtgattcctttaaacattctttatgtgctgggcacagggctaggggctcaggaaccaggcgtgcgaaaccatgcatggtcatggcctcaaaggccgagctcaccatatgtggacacacatggacaagggggtcactgacctgggaaggctgtgaggggcactggtcagggcaggaaggccttcctagaggaagtgagtcaggtgagaagaagttaaggagcaccgttcctcttcttgggaccttgggcatgtctgtgtccccagctgtagcagaataaggtgccatctatggatgtggtgctgtgtggtctcatgtagccccatccacggcctgaccttcctgaaatccataaacgctgagctacagatgtcacatgtgtctaagatcactggacagaattagcatgcctcaatgaaaatgaactacgtccccaagtaatggcacgattgcagttaaacttatgcaacttcagaaataacggcagataaagggctagagacgtagaaaccgtggctggcatgagggaggagcttagtgagccatgggatgaaggaatgtggtgcctgcaggagcccgagtggccaggagccctgctcttcccaccgtgggactcctatggcctccccaccactccagcctctgcctggggctcctctagcccctctagttgggagaggtcatcccccaacagagacacaaagtatcaaaaagacaagcatgcttttgtttcctgtttccgtcaggtgtttctctgatccgtaagagcctcctgcccgttcatccatcaacagcctctggggacaccttcggcagcaggaatcactggtgttgggtactgagtttgaatttctgtgcccacctttgcgctggcacaaaggggctggctatgtggaagcagaatgtggggcccttgctttaaagacctcagaggctggttgaagggataaacctcacacccccaaaattgagagaaaacatcaagggagctgcaccgcagcaccaccttgctctctgggcttcagcaccagggaggcggacagctccattcactgtggccgccaccgcccatccaggactccagccctccccgcatcatcgctctgcttggctgtcgggggaggagagcggctgctgctgtgcatgggtgcttgggggcggtggggggtggggtgcagaggaggcaccaccctacccggggccatcaccaaccaatggggatgggagcgggtagataaatgccccagcctccccagcgtcggtggacagtttggaagtgcattcattctccatggcttcccagagggcccccagcaggcctgagcagcagctcttgtgaaactgccctccatgggctgctctctcttcctgtctcactgtgtgctccgtccctcacttcagcttcctggtctcacatcccaaacacactaccttcgtccaagtccttgtctccaccagggcttacatttggggtgcctagaaaaggagagagcatataatcaatgccagggtgagtggggggacacccagagccatgaggtcccaaggagggggcgatggcagggtggcccgtgaggcaggtggtctgggcccaatccccggctcaggatggacagaaggcaggagcagcctctgtgggggctggtgacagtgtgagctggcccagcagtgggtgggcttggctccaagggtgccacagggactgtgaagcaggctggagagggtggcgagcgggcctccagtgggaaaaccaggcatggcactgaggcgggcaggtaagttcagccctacactcctcctccttccggccggactctcacgtggatctctccttctggctgtgcaggttggatctatgaacacgagacacagaaacaccagctggaggagcccaggaggcccagcaggtgaggttatccacagaataggcacgccgccctagtccatggatcactgagtgcccagaccagggcttcagggggttccagccgaggctttgtgaaccggatcctgggtcactgagtaaccagactggtctcaggaggttccagctgaggctttgtgaaccagatcctgggtcactgagtgcccggaccaggggttcaggaggttccggccgaggctttatgaaccggatcctcctctttgcgtttcaaacagcgggaaccatcttagtccatgggccactgagtgcctggaccaggggttcaggaggttccggacgaggctttatgaaccggatcctcctctttgcatttcaaacagtgggaaccatcttagtccatgggccactgagtgcccggaccagggcttcagggggttccagccgaggctttgtgaaccagatcctgggtcattgagtgcccggaccaggggttcaggaggttctggccgaggctttatgaaccggatcctcctctttgcgtttcaaacagcgggaaccatcgtagtccatgggccactgagtgcccggaccagggccccggggcttcctgacagcaggaacaacaggaatcattcaaaccctggagcccagagggcaggacgggagcggccttttgtcccccgcgggcaggccagggaggtggacaggccgggagcctgaagcctgagcagctggaggctcgctcattctcccgtggtcactgtgttcccggagccccaacagagggccaattgtcccacggggcggtgcctggtgggtgtggtgtcttggcggcagccactgcctggctgttctcaggatcccaatcccaggtgaaggctgcagtcctcttgctgtgtgtggactatttagctccgtgggcggccaccttgccatggggccacagcagccattccagaggctcccccagtgccctcctcgcccgggggggggtgctcccgggtgtggtccggctgaggagtctcactcgcaggaaaggtggcgtgtgacgggctggagccggcctgcgaagtctgcctggtggccatggctcaggggcctgtgtctcccggacgcccccagcggggcctctcttgaagggactttgtgctcctgccaggagaaaacagccctaacagctgcctcctgggccatttccaaacattcgtgtgtcaggccagagagcgccagttcgttgcccttttgggtggttccaaacgtgtggagttggggccctggcagcttcggaccaccagccccccttcactgaggggttcgtcatcaccaagcctcagccagagatgttaaactggaaaaacaatcacggacccccgtgggggaagcagcttctggtctggggacagtcatgagctctgcatgcagctgccggtgtcccttctcggtgcctggcgggtatcagggctcacccttggcctggccacacctaccgcctctcaggcccacacctcttcccggaagacacctggaggcttcaacaccggctcacgccctttcctggaagaaacctggaggctctgacgccggcccacactccttcccgaagaaacctggaggcttggacgccggcccatacccatttttggacaccgggggcttcaatatctgtggcatcagctcctcagctctctcttccctcagcatcccactgacccgaaattccaggagatcccgagatgggccaaacacaaaacaagaaaacaacaaaaacaccctctccagaaagtagagaggaggctcggagtgaaggtgtgaagtgctgtgcccggcacaaagttcatccggacagagcggctccttcccatctgaagctcccattttcctacagaaatgagttccgacatgcactgcacagctgctctctctccgctttgcaaagcaggaactcatgatgtctgatgagaatccactctgctctggtctgagctggggcaaatcttcgtttgtcctccgcctgtccaacccagccctcgcctgcagggcatctcagagcccagcaccttccctgacgctctgctgagcccggagccacttggagctcaggaacagcagagggagggaggccacggggtctcagcacagaaccagcaagtccgaggctggacatctgagcagcgggtggttgacagggcccatgggcagaccccgcgggcagaggaccggggtctctgcctcacccgcttccaccgcccttgggtgcacctggccaaggccgtcagcaaaccgagccaggcctgtgtcctggttccctcatgggctcatggtcctcctgccaccctgcgagagcacccccgtgcacgctgcctgcagctcccagccgcgaacggcagaggcccagtcccgccgtcacaccctcgtcccgcctggctttcagcgacgtcacctttgcctggcaacattcaggcggggctgctcaggcctgctgattccatcatttaaagacgcccatttcttctaagccagggattttatgacgctgaggattagaagctgttatcccaaccaaccctggagcactctgttctgatttgatggtaagcttcactaataaactgtttaaaacatacgctaattgtgtttattgtattctttaattatcatatgtatcattaaggatgtgcttctcctggaatccgagggccttgcagcctctccccgccgtgtgtgcatgcgtgcacatgtctgtgtctccatgcgtgtctgtgtgtgtgtgtgtgtgtgttcctagtgcacagaacatttaccttttacaaattagaagaaacatctgtgggagcctgtggtcagttcggccttcatttaaagtgaggatttagacagtctctgagctttgccgcccctggaagcagaggcgggaaacgaccggataaaacagaacgatggggagtttcatcctgtcatttattttgagtctgactacagatcattatttctcattttggatttcagatggtttgaaatgcaagtctagctgctcaaccatggggctctagaaagaggtgcctggctatcactcaaggggttgtgggagcccaggacggtcggaggcgctaggagctctgggattgcctgtgaggccgcgcagagacaggagtttaagatgaatgaagcaccccaaccttgcgctctgggaatgcgccgtgtttaaggctcccctggtcctctcccgggtgccccggacccttcccaagggc

SEQ ID NO: 328 - DNA, 258207 bp, Homo sapiens
  source 1..258207: mol_type = genomic DNA
tgttgctgccccaaggtggcccactgcctccacaatgggcctcagtgacagttctgagtgaccgagatgcagtgatggggagggacagagaaggccagatctgtccagatcaaagaacagaggccatgggggaaaggtcccttccaggcgaaggagaccgccatgaatcatgttcttatcacctcctaataggctcatgatgcaagtgcacctcctaatcactattttcgaccccaaccaggctcacgcccacagtcagaagggttggacaagcttagtatcgtggattcacgggagaaaatatctgggagaccccatccttggacctgctttccccaggacccaggagtccgggtccccagctctccagttccccagccccaggagtcccagctctcagcccctctccttttgtttgttgcctgcgttttcttttttctctctgggcctgtaactctttgtttatctccatctatgttttgtgtctctcttgtatctttacatctgtatctggattctccctcactaggcctcaattttctcacttgtaaactggggataatactactaataataatccaatctctcagagctgtggcgaggaagacatgagataattatgtaaaatgctcagcacagaaccaggccacagtaaactcagtacaagagagctctgttattattactgttttatttttgccatctcccctttggtatctctatttttctcttagtctcacgtgagtctccagtctcctctagctctgggttccttttgcagacagcacctgcctctgacttcccttttcgggatgaggaaagggcatatccaggccagagcttcccctgagcctcttccttctccctctccattacaagctccgcctcattacccagaacacttgcctgggggtaaggcctggctcccttcccataaatagcctcataaaatcctgaaccccaaacctgtcatccctgggcgggcgagtgactcaagatcccggagttcccgctcctagacaccaaaccttcaggtttccagccccctcctccctctgacccaggagtccgggcccctagtccctccttcctcgggtcccagacttctcctccttcagaaccaaggagtctgaactctcaaatccccaaccttcctcaagacccaaggatcgggtcagcaaacagcctaggtatgtggggccagaaactccattcacgaccattctgcgaccgtctacgcccagggctcccaccccgactcagtccctccggaggcgggtccgacacgcgaggcgcttctttggagtctggcggcgaaagctatccatgacgtcagtcactatcttccagccaatggacactcggccttctacctccctgggccactcaggaccctttgcctggtaggcggggcccacagcccaactcgggcagcgataggctttcggagacgccagtctctgccaggcccagtcagtcggccaatagacccggaacctgagggatcggaatcctggtccactccgcagaggcccgagcgggctcgcgagggaacgggttctccgagtctggccgggtaagccctttccagcacgcctagtattaggattctgcacatagctcgggtggaaaaccgtgaggcttagtgaggcttgaggcggaggggggaggagctcagtcccggcgaacccatcttgctttcttggagaaactgagaccgggatactggatctgttattcatccatccgttcctcccaccctaagcctgattctcgtctgctcctgccttcctgttccttcatccgttctgcccttcctgccctcaattctctcactcacggattccctcgtctagccactcactcacacactctcccacctattagttagacaaacatttcctgaggcttctggtgtgccaagcctcgtgctgggcgatgctggtgaccaagatgagtcaggcctgggccgtgccctcaaggagcccgggtcagatgggaggatggacgttgatgggcatgggtgtgcggagacggtgggagcccaggagagacttttttgagtttggcgtggtcgggaaagggtttccaggggaggggccattggagctggatcttggaggagcagaaggtgccaggcaaagtggagatgccaggcaaaatgggtgtggggagggtgtttcagcgtgaccaaagacagggaggcatgcaggagcagtactgcgtgcaggtgcctaagcggaaggccagtcaagtctgtatggccagcaggggaactgtaaggctggaggaggccgaagagatgagcagaggccaggctgaggagcttggactttgtcctgagggtgagggggtagtggagagccatggaagggttgagagtagtggaggacaaggtcatagttggtccagaactggaggaatgagactggaagccagtagcccaggaggtggctctggcagggattcaggtaggagagagtggagcctggatcagggaagaggccgaggggataagatagagattcaggaggcaaggcttggtgctgtggctcgtgtctgtaatcccagcactttggaaagttgaggcgggaagatcacttgagccaaggagttcaagaccagcctgggcaacatagtgacagcctcatctctacaaaaaattagccaggtgtggccaggcgcggtgactcactcctgtagtcccagcactttgggaggccgaggcgggtggatcacgaggtcaggagttcaagaccagcctggccaagatggtgaaaccctgtctttactaaaaatgcaaaaaattagacaggcttggtggtgggcacctgtaatcccagctactcgggaggctaaggcagaaaattgcttgaacccaggacggggaggttgcagtgagctgagatcgcgccactgcaccccagcctgggccacagagtgagactcaaaataaaaaaaaaaaaaagaaaaattagccaggtgtggtggtgcatgcctatggtccaagctactgaggaggctgaagcaggaggatcacttgagcccgggaagtcgaggctgcagtgagccaagatggtgccactgcactccaacctgcacaagagtgagaccttatctcaaaaaaaaaaaaaaaaaaaaagaaagaaagaaaaataaataaggagattcaggaggcagagagaacagaaagtggggattgatgggctatgggacaaggggttgtccagcatgagacccagagctctagtctggaggacagtggagccatctctgaggtggggacaggaaaagaggagcaggttgatgggtagtgactgttttgacagaggtgaccaaggggttctatgagttggacaaggagagtggtgactcaggccagtggatctggaccttcaggaagagttctgggctacagctccctgccccagcacaggccctgactcagaagtcacttgctgggtgaacgaggacctctgagctgaggatcccttgcttcgcaccccgtgaggaaacggctttcttgtttctgcatcttcagtctctcccactcctccagcattcaaacatgtccatcatctctaaacacatgtgccctgtatcaggctctcttgtggcgcccactggctcaatcccttaccttccactccctcttcaacccactatgtctggctgcctaacggccatgaccctgcagtggctctggacaaggtcactgaggtcacctgctcattgctgacacctgagggtaacatttcaatcctcatctgacctggtccactccctgaaactcccttcaccctacatcctccttcctgggcagcttcctccctctctggctgctccttagaacccgccagccttgccttccactgcccacccccgcccacccctttactaggggtgtgatcctcagggctgtctctgtcctggccctcttgttgcttgtcccacctgcccaggcttcctggaaaggttctagtcccttggttccacctagactgcatttttttttttttttgaggcagagtctcattctattgcccagactggagtgcagtggtgcagtctcggccgactgcaacttctgccttccaggttcaagcgattctcttgcctcagcctctcagttagttgggattacaggcgtgcaccaccacacctggctaatttttgtatttttagtagagacagtgtttcaccatgttggctgggctagtcttgaactcctgacctcaggtgatccacccgcctcagcctcccaaagtgctgggattacaggtgtgagccaccacacccagccccagactgcacttctgacccttgttgtctcctggattgtcttcctgagaccttccagctcaccatgtccagaatggccctccacaggtcccacctgtcacacacacacctgagcctcctcccattgaagagacagcttcactgtccacctgcttccatggccagacctgggtgtcatctctgtccccttgctgtcctgtaacctcatcagtaggtgctgtccttcccaccttttatggctctgggatgctacacctacactccctacccttacggctcctgccccagctcaggcatcctccttggcctgtaggactccagttttgcccttttctgtccatcccccagtgtcccagcaggatctttcagtgccctgagctgaccctggccctttcctgctcaaagtgctcctgtggctccccactgccctccagtttagtccaaatcgtactccaggctcttcaggccctgctcctgctgaccactccaggcccctcacgcccctccccactttgcacctgaccttctggtcaggtggaagctttttctagccaggtggcagctttgatcactgccagctggctctcacaacctggcatgttttttcttcctagcagacttttgttcatcctgtagtgtcaagctcagatcaccacctctgtgaagccctccctgactaccacaggtggaacccctggggactgtgacagcctgtgtctgttcttccaccctctctgaatccaggatcagaagccctttgaaggcatgtcttgggtataaatcatctcaactccaaactcagggcttacaaggggccagagagttggtccaagagttgattgtcacagctggacagagcttgcatttccagtttttgtttttttggaaacagggtcccactcttgcccaagttggagtgcagtggtgcgatcatagctcactgcaacctcgaactcctgggcttaagtgatcctcctgcctcaccctcctgagtaggtaggactgcaggagtgtgccaccacgcccggctaatttttaaatgtttttgtagagactggtctatgttgcccaggctggtctcaaacccctggactcaagctatcctcctgtcttgcctcccaaagtgctgggattacaggcgtgaacctccgtgcccggctgcatttacagtattttgagcgccagtttgtttctgatttcctgctaactttgctccagttctgtagggtgtttgggtcactggagcctttgagacccgagagattatttttaacttttatatccccctgatggatgctgagcctggtctccctgggaccagggtgagtccagctaaccgaaggtcttcaaggggaggagctgaggacccagcatctcctggcagtgtacctggatgaagtccgaggggaggtgggtccgggttaccaaggagtccactcccttctggtcccaaaaatccagtcccccatacccctcattccaggtttcttggttcccagccgcttgagtccgatgctgccccctggtgggcaaacaccccaccgtatttgagagaggccaaactaattaaatacttttatttacaacaaaccaaaccgacctgcaagggagggccagtccccgtccctgcggcggtcgccgcagcagcagcagcaaaaggcagcggtggcgtgcaggtccagccgtctcggtgaccggtgtgtgtgcgcgtccccctccccgtggcgagggtctcagctttcgggcccccgccccgcccccttgccacccccgacttaagtaaggcacagcccgcgtccccttccgcccggcccggaaggcattcatgacggaggccggcgcagatgggaacaacaggcttttagtgtcgccccccgcagcccccgtctacccccgcagcccccgtctccccgctcggcccggctccggcgggaggagtgaggacgaggcggatgcgctccacgcacagctctgcggcctggcgcgtctcgcggcacagcgccgctagggtcaggaagccgtgcggcaggtcctccaccacgcgcagcgtcaccggctggcccaggttgcgcagtcgccgcgcgagcatgaccgagtcgtccagcatggggtccagcgcgcacgcctacgggacagcggggagggacgtggagagagggtgggggacagacagaccggggtcgggtagagcgaggaggggtttgatgaacaaagggagcgggaaatacggatacagacggagtggacggaggcaggagacatggtgggtgaggagttggggagagaatggagggaatggggggagttgtgggaaggatgggagaatgactttaactgcgatccccggcctctctccagcctctccctccccaccccgccaaacccaccttttttttctcttgattctccaagcccaaggggctgccccactgatcctgtctcttggtactcaaaattgcaaagtaaaacggaggcagccctgactcttgtcctcctcccgttcgttcggggcattgttctcccctggggacacgcctgtccctttctccccactccggagctctttttcccaggtgtacccgtgcccggtccccctcctccccgggtgccctgctcttctctaaatgcacctgtaccggccccctctgtcgctcaccacgatgtgcacaggtggcaggctcttgagcatgctgtcgggtgccagcagcggcgacatgaaggggttcttgactatgggtgaggagtagaggggcatctgtgtggcaccctggctggagcgtcgggggtggaaaccctcggggaaggcggcacggacgcccaggcctctgtccatggggctcagctcatttttggcctcagcctcttcccctgcatcctcaggtggtaataagaagttgacatcggagggtgtggaggggctaagtgtctcagctgacagcgacatctcgggggtgtccgacgacgtctcggagtttcccctcaggctcaagtccctcagggtcaggttcttgagggaatccgtgcccagtgggccctggggctgggccagtgctgcttcagacacactgcggcgcatcggctctgagagagggagagcagataggcctggctccgttagtttggttgtgtgtgtggctggcagggaatgccatgggaagggcagtcgcctgtggagcgctgtgaaaggctgtgtttccccagactcttgcctaggggatgggtggagttccagatgccccaggtggtcatggtgggggtcttggcagtggggcagtgtgttctagtgaaggatgtgtgtgtgtgtgtgtgtgtgtgtgtgtgtgtgtgtgtgtgtgtgtgtgtgactgggaagattaggtgcagtttacctctaggaacctattttttcttctagatcaaggaaatgaaaatagtccttggttcataggtggcaggactcagtgggataagatgtgggattaggtaccgctacccactggggatcataatatatcgttttttgtttttttttttttgagacaaagtctcgctctgtcacccaggctggagtgcagtggcaagaacatggctcactgcaacctccacctcccaggttcaagtgattctcgtgcctcagcttcctgagtagctgggactataggcatgtgccaccatgcccggctaatttttgtgttttttttttagcagagatggggtttcgccatgttggccaggctgttctcgaattcctggcctcaagtgatccgctcgcctcggcctcccatagtgctgggattacacttaccacaaggtgtaaatggatcaaaatgatttgaatagtaagcaggcccagtggcttgaagggaggctctgttcacagggagctaacaagtctccagggtgtatcacatttctaggggtctggcacctgtagccacatggatctgcttccccacatttcctttgtgttcttcagttttatccgttcacgtgaccaggcaagcaagtgcccaaacgatgctaaagatacacttccagcccacctggcgtgcccagcttggcctcagctctgttcattttatcagacccacactgcctaccatgagggccaagatgctacagttttagttttttactttttttttttttttttgagatggagtcttgctctgttgcccaggctggagtgcagtggtgcgatctcggctcactgtaacctctgcctcccgggttcaagcaattctcccgccacagcctcctgagtagctgggattacaggcatgccaccatgtccagctactttttgtattttttttttttttgagacagtctcactctgttacccaggcttgagtgcagtggcgtgatctcggctcactgcaacctcgtctcttgggttcaagtgattctcctgcctcagcctcctgagtagctgggattacagatgcatgccaccatgcccggctaatttttgtatttttagtagggatggggtttcaccatgttggtcaggctggtctcaaactcctgacctcgtgatctgcccgcctcggcctcccaaagtgctgggattacaggtatgagccattgcgcctggcccatttttgtatttttaatagagatggggtttcactatgttggccaagctggtcttgaactcctgacctcaagtgatccgcctgccttggcttcccaaagtgttgggattatgggcgtaagccaccacacccagccttacttgtctttataaatctacgaaggtgaggtgcaaaacaatgtgagaataactacttaagtactttgtggcccagagggtcactggaacagaatggacacaccaggggtgctggcatcttctaatagcacctactgggtgccatatattgtactggccaaatggttggaggcagacctcaccacagcccagtaagcgtactctttttttaaatttttttttttgagacaaggtatcgctgtgtcacccaggctggagtacagaggctcagtcttggctcactgcaacctctgctacccaggttcaagcggttctcatgcttcagcctctctggtagctgggactacaggtgtactccaccataccctgctaatttatttttttgtagagaaggggttttgccatattggccaggctggtctcgaactcctgacctcaagtgatctgcccaccttggcctcccaaagtgctgggattacaggtgtgcaccaccacacctggctaatatttttgtacttttactagagacagggtttcgtcatgttgaccaggctgatcttgaacccctgacctcaagtgatctgcccacctcagcctcccaaagtgctgggattgcaggtctgaaccaccatgcccagcatcttccctgggacttttgctgtgctaggctgtccctcctgcccaccctggctgggcatgtgacgggagtgaatcactcacctgctatgggctccgacatcttctgggacttgcgcccacttaactccaggaaggagttgagccatgaggaggcacccaggcggaagtctcggaggagcagggctgtgtcccgccgcaccagccccatcatgccgagggctttctggtctgagttggagtggtcctccgtctttgcacctgcagaatatatgtgggtagctgagttgttttcccctttctgggcccagttttaacgcccagaacttcaggcatctgtggtcccagggacccgagaatatccaatcgcttcaaaagggataaggaggctgggcgcagtggctcacgcctgtagtcccagtactttgggaggccaaggcgagaggatggcttgagcccaggagttcaagaccagcctgggcaacatagcgaaaaacacaaaaattagctgggcgtggtagtggtggtgcacgcctgtagttccagctacttgggaagctgaggcaggatgattgcttcagcctgggaggtcaaggctgcagtgaggtgtgtttgagccactgcactcagcctgagcgacatgacaccttgtgtctgtctgtctctctctctctctcacacacacacacacacacacacacacacacacacacacacacgaaaaaaaagggacaaggagtcttagattcctctgcctggcctctccttcctcagtcacaggagtcctggtccccagcccgtccctgcaggagtcagacatccatgcagtcctgtttccctgctgagggtgtgggcctcaccagcataggcgctgacacacttggagagcacactgaggggcagcaaggggtccatgaggctcagcaggcgggagggagaggcggcaggctgcagcattgtggccgggtaggctgccatgatgccatctggcacccgcaccccgtaggctgctgcccgaagagccacggtgaagcagaggttcccgcctgcactgtcccccgcaaggcagattcgttcccctgttgagcctggtttgggagaggggtggttggtgacaacctggcaggggcagaggcctggggaggagggcagggaggaactcaagctgggagaactgggctctccaaggtggggtgtggggcactccaaggcctagcagactgcagttttagagactggcagactgaggcacagatttgggctcatgtggtagacagagggtcaggatgactcaggacctggagaggcccagggaagcactgggaaagtctgtcggggctggaggttgggagcagggagggcaggtggtgggaaaggggagctgagctcaggcctgttgcaggaggggggcctcagagggcgggaatggaaggtcagggttcagggtcagtacagaggggctgggctgcaagctctgtgccctggggcatggccacactctgctctgtgcctcagtgtcctcccaagatgttgatcttcgaagagggaggtcagagaagctggactgtgggccaggaggctggtaggacaggagagcagggcctggagctatcagagggggacgacagaggcccagggagacaggacggtgggtgggaagtggaggtggaggagatggagagtctgggtgccacagttggggacagaggataaagtggctgaggtggaagattgggcaggacctgggtgagcaggagctgggaggtgtggggggagagaaaggtagagggtgtgaggctgaggctggaggagcttaaagcaagctgggtgggatgggagcaggcgcaggtggctgtgggggcctgaggctcaccaaggagggcgcagtgcttgatggcccagcagtaggcgaagaagcactcctccagcgcacgggggaagggggcctcaggggccagggagtagtcgatggagatgatgggggcgcccagctcctgggcccagctcttgaggtagggctcgtgggatctggaggtctgggccacaaagccaccgccgtggaagtgcactatcagggaccgcgagcggggtgcctgctgggggcgcggccacagctccaggctccgttggccgttggactttatcaggctgctgagctcctcactgtcctgggggtgaggagggagacggtgtgtgaggttggggagagctggccagggctgcacccctccatggggatgccaaggtgggggctgcccacgctcctcggctctgtccctgtccctggctgaggctggaaccctacctgtccttcacgcaggtcataggagatgagcctgacgaggacgggcccagggcctgtgtgggccagtgggggtgagatggtgaccgtgagcgtggggtcggcagtcagtggcatctcaaaggcttcgggtggcaggctgagcaggcggcttaccctcacggtggccgatgccatgttggccagagactggagggaggggacagaaggggtgctagggaaggtctgcctgcaggggtgcccttcacctctccctctgatccccagtctttccccttgtgtgccatccctgggcctggagccccacagagacctactgtggcctcagatgagtctctgggcctcagtgtccccatctgcaacaggccctcaccgatagcacttccatctcggtgatgttccagaaggctttccagaagtgcacgtccaggttctgtgtgatccgctcaaactcagccccacgcagctcggggtcgatggcaaagcggccgctggtgaagagagagctggcggccacacctaggggtcagaaggggtgtcagggagccccagtgggtcaggctgcttgggcaggagtggggaggagggccaagagagtaggctgcgagtagaacctggctgggactcactgaggcctgtctcgttgcgtttgtagtgctccccgaaggacaccagcccaatggagatggtctgcaggaatggccggatggcaggcgtgaactgtggagagacgcggctgcgtcacccaccgctcaagagagggatggggacagggcaggagcgaggcacagggatgtgcggggaagacacattcattcagtaaacgtttcatgagctcctactgtgtgctgggcatagctctcggctggttcacggacctgatgttctcaaagggaaaacaaatgatcagcagataagcaaagccacgcgcagtatcatgacaaggaatgacgaatggtttggaaaaaaaaaaaggcagtaggtggagagggcaccagtgatgactaggggtcaggctacttagcgggtctcggaggagagatctgactgaagcgaggggagggtgttccctgcacagggaacagagagcatgaaggcttaaaggtgagctcataggaggctgaggcaggagaatcgcttgaacccaggaggcagaggttgcagtgagtggagatcacaccactgcactccagcctgggcgacagagcgagactctgtctctaaaaaaaaaaaaaggtgagctcatgcttggtgcttgacctgggtagcgacagtcagggggccagtgtggctggagcagagtgagcagtggggagaggggcaggtggtgacattggagaggcaaagggggctcatatagggcctgggcagaggaatttggatttcattcccagtgcggggtggtgccactggtaggctgtgaggtggggagtaggatggtgcagggacttcctgaaagtcagagagaggatggatggggagaggaggcagctggaagacaggaacagggagatggccagagacagccccccaggcacagggacctgaggcagaaagacagtcagagagggagactgaggcctagacataggaccagccagccaccacgggggcagggagagacagcgtctgacagagcagacaggcagttaaggaaagacagtggggtccaggtgcagtggctcatgcctgtaaacccagtactttgggaggccaaggtgggtggatcacttgaggtcaggagtttgagaccagcctggccaacatggtgaaaccccatctctactaaacaaaatacaaaaaaaaaaaaaaaaaaaaatacaatggggacacaggattagaggaaatggagccataggaggccaaggcaagggattggcgggttcttctgttcactctgtactggccaagttcctactgcatgctagacactgggctggagcagtgaccaagacaggggaggcctctgccctcccggggacggacattttaaaggggagactgccctgcaccaaggcagagctgggccctgcccctggctgtgcgcccagtaggccagagggcacctgatgcctggctattgtggctgggatgctggtttgggcagccccgggatctctttctcatgactctagggtcacggctgggacacagggaggagctggctggcccagctgggctgatcaatacttgtgggttcagccctggtgaggggaggtttccaggaatgcctgggctgggttgctgaggataggctagcctgaagggaagcctggagatgtggggtgggagggggaggctgaggtgcggggaggcccagagagggccagaatgactatagggtcacatggctccagatccctccctgaggggtctcaaactcaagtgacttcaggggccagacaggtaacaaagagtgaatacatctcttgcatgtaggacaatagagagtagtggatatcctggtgaaaaaagctctgcaagttgcatttcttaccacctagcagatatgacctagggaccatgagtttgagacccctggtgcagctctgtctgagctccagccaacttctcctttctgtacctgctgtttgctgagtccgataatgctgaccactggttactttaccatactataggccaggccaggggccaccaggtgccttcattgtgggcccagaggggcacggggcagggggctcacctggaagcccaggcagcggccatagaagcatcccttatgcagcgtgacatactcccggaggaagtcggcggtgagcccctcgtcgccctcaaagaagagtacccccggccgattggtaaccagcaggcgctgggcgtagtagaccagagcgcggagctgggtgagggcagccaggtaggcctccagctcggccaggttgtggctggtgcggaagaagatgctgcggcggttggaggccacatagcgggatttgtgcaggaggtgcgccaggcagcagcgggctgtgtgcactaggctgcggtacccgttggccggtgtctctgggtccaggtcaaagaggtgcgccacacccagcaggcggcccagggccggctccagccccagcgcctgctcccgtacaccggcaaaaacgcctgacagccgctgggccgtttccccaggaccctggctcgagaagaaggctatgttgtcctccgccagagtcaccagcgactgtgtcattgtgcgcaggtccatgttgtggatgagccttgaggctgtgggcaggtggggaggcctgttaggtggggctggatcaagccttgcttagctggggcccaggagtctgggccatagcttacccactcctccttcaaacctcagtgctgtcttctttcagttccaggggcccaggaccccaggttcctcctcccttagacataagaggtcaccctcttgtctctgggaatcagaagtttggggccccagttcccagtgcctttgtccctcctcgggagccaggagtttgggccctcagctccctcctccctcagacccaggagtccaagccccaagcccttcctcttcaggacccaggagcccctgctatcacctctttgggactcagaaacttgctgccctggcctcctgaatccggacattccctgagcccacacgactctgcttccctaactcattcacctctcctgtgatccaggaggctgccggtccttctttcttccttccaggaacccaagagtctagtcacctgtctccatgaattctcctggggcccaagactccttctcctagattccaagaagtctaaacctccagttggtccccattctcaggacccaggagtccgggtcccccatcccatctttccttcttaggccccaagtgctacccataggcccttcccctccaacaacatttgggagagttcagccccagccctcccattcccatctctcgggaccctggtccccaagcgcagctctccctgaactcaggagttcacaattctagacttcactgaagagtcattcctcatccttcaagtctggctgtggaaccccctccaaatcccagttccctccctgtttctctgtgagatccccaaaactcagtcttgcttctcccccagtggggtcccctggccttcaggcttgtccactggtcctgggttgcatggccggccctgctcccctgcctggaacagcgatactcatcactggtgtcgaccttgagcatatccgtgcaggtcccgtgctgagagctttctgtgtgtttgctgctttagcgtgctaaccctctgggacccacaccacctaggttcaaatctctattattgccagcatccccattttacaggagaggaaactgaggctcaggttttaagtgaggaggttaaagttgcactgcaagtggcagagcttttgtaaacccagctctctgggtccacagccacacttatgtggggctccccgctaggactctggaagccacatctcaaaacttgccctggactacgtctgatctccacactttccagtccccagtgatctttcctctgatatcctttcccagccattcaggctgccctgtttcttggatgccctgtcacccaggtcctgaacaagctgcccttggtggaatgctaccatctgctccagtgacttccctcccaaagcccagcaccttgcctgttcccctagaagaaggtatttcctttcccttctaggtcctggggcctggcagcggccattcccgtctctcagctggctggacactcacccctcctaggcatcttccgagcttccctgggctgggactgctggtctgtggcttgtgccagtagcagcctggggcaataaacccgggggcggggctggcctgcccagggtgtagccgcacaagccacctcccacccagaaagatcagtgaggaccacgtgctgtaaacagagtagagggctcagctccctgctctgccccccacctgctcccagactcagctcaactggtagtcctgttacaggctcctctgccttagaacccaggagtccacacccacagcccctcctccctcagacccaggagtccaggcccccagccccttcatcctttaggacccaggagtcctagccccagtcctgaacaaaccgtcccctctcacccagccaggctgccctctctgtccccagagaggactcagggagccaaaggcccagtgatctcagctcccgcctcctagtctggccctggcacagccagccccagctgttggggggagagaggaggtagccagccctgcctgtccctcctggaaggacaaaagccgattaagggcagtgccaggctcagctaggggcctgagctgcctgtcggtcctactgggtggtgtgaccacactgggtaacctggacctgccacttacccctctcagcccaccctgctgtgactggcatccccacctcacacagggaaacagaggctcagagagagagattcctcacccatgtcattcacccgtgtcattccacagattccttgtctggcctcagcttgtcacttccaagaggtactccccagttgcttctccccagctaagatatgcacgcccccgttattttctgccatgatatttagttctgttccatcctgccatttgacactttataatttgtttacgtgtttgttcatctcccccaggacaggactaggttttatggagccatgaaacttataaggtaccggggtgtggccctttaggaagaagaaatacagaattacaaatacaagattagggccttgggccaggcgtggtggctcacgcctgtaatcccagcattttgggaggccgaggcgggcggatcatgaggtcagcagatcaagaccatcctggctaacacggtgaaaccccgtctctactaaaaatacaaaaaaattagccgggcatggtggtgggcacctgtagtcccagctactcgggaggcggaggcaggagaatggtgtgaacctgggacgcggagcttgcactgagccaagatcgtgccactgcactccagcctgggtgacagagcgagactctgtcttaaaacaaaacaaaaaagattagggccttgaaaggggcctgtgtgactgaggggctctgaggcctcagggtcatttgcttggctggaagtgaatcttctgtcccggactgtcatcccccaggtggccctggggcctatcatgggacctggcacatagcaggtgctcagtggatatatgaagcaggaaggaaggcatgaagaagcagagcgagggcagaggggctagttagctcaggagaggacggcccctccccagggctggcagacagatggatagacagaggcctcaggaggcagtgttaggcttgcagctgtgaaaatgggacgatgtgggctaggcacagtggctcatgcctataatgccagcacgttgggaggccgacgtgggtgggccacgaggtcaggagatcgagaccatcctggccaacatgctgaaaccccgtctctactaaaaatacaaaaattagcggtatggtggtggatgcctgtagtccccactattgggaggctgagacaggagaatcacttgaacccaggaggcagaggttgcagtgagctgagatcacgccactgtactccagcctggcgataaagcgagactctgtcagaaaagaaaggaaagaaagaaaggaaaggaaggaaagaaagaaaggaaagaagaaaagaaaaggaaagaaagatggcccaagcccttgctggcgaccctggatgagtctgttttcctcatctggaaactgcacttggctgttctgctggctcagggtgggagacataatttataagtggggccatggccggcatgttctgcatgtggtttgctttgtgggctcacttggccttcctgagatggtgtattgggtgatttttctctgcggcacttgtcaccatctagcatactatacagtttactacaggaataccttgcttcactgtgcctcgcacatactgcattttttacaaattgaaggtttgtggcaaccctgcgtcaaaccagtctgttggcaccatttttctgacagcagttgctcactttgtgtctctgtgtcacattctggtaattttcacagtgtttcacactttttcattattattatatttgttatgatgatctgtgatcaatgatctctggtgttactattgtgagtgggggcaccaccaaccatgtccacgtaagagggcgaactttaccgattaatgctgtgtgtgttctgactgctccactgaccagccatttcccccatctctcttctcgagcctccatattccctaagacatacaatattgaggccgggcacggtggctaatgcctgtaatcccagcactttgggaggctgaggcaggtggatcacttgaggtcaggaggttgagaccagcctggccaacatgctgaaaccccatctctactaaaaatacaaaaattagctgggcatggtggtgtgtgcctgtaatcccagctactcgggaggctgaggcaggagaatcgcttgaacccgggaggtggaggttgtagtgagccaagatcacaccattgtactccagcctggaaaatagagcgagagtctgtctcaaataaatgaaatgagatgaaaaatagaataaaataaaatagaaatcaggccaattaacaaccctacaatgacctcaaagtgttcaagtgaaagaagagtcttatgtctctcattttaaatcaaaagccagaagtgattaagcttagtgaggaaggcatgtccagtgctgaaacgggctaaaaactaggcctcttctgccagttagctaagttgtgaatgcaaaggaaaaattcatgaaagtaattaaaagtgctactccagtgaacacatgaatgataagaaagtgaaccagtcttagctgggcatggtggctcatgcctgtaatcccagcactttgggaggccgaggcgggcggatcacgaagtcaggagatcgggaccatcctggctaacacggtgaaaccccagctctactaaaaatacaaaaaatcagccgggcgtggtggtgggtgcctgtagtcccagctactagggaggctgaggcaggagaatggcgtgaacctgggaagcggagcttgtagtgagccgagatcgcgccactgcactccagcctgggtgacagagtgagactccgtctggaaaaaaaaaaaaaaagtgaactaggcttattgtggatatggagaaagtctgaacggtctggatagaaggtcaaaccagccacatttccttaagccaaagcctaatcccaagcgaagccctatccctcttcaattctttgaagggtgagagaggtgaggaagctgcagaaaaaaggttggaagctagcagaggtggattcatgagatttaaggaaagaaggcatctctgtaacataaaagtgcagggtgacggccgggcatcgtggctcacgattgtaatcccagcactttgggaggctgaggcaggtggatcacctgaggtcgggagtttgaaaccagcctgaccaacatggagaaaccccatctcaacttaaaatacaaaaaagaagccgggcgtggtggcgcatgcctgtaatcccagctacttgggaggctgaggcaggagaatcacttgaacctgggaggcggtggttgcagtgagccgagatcgtgccattgcactccagcctgagcaacaagagtgaaactttgtctcaaaaaaaaaagtgcaaggtgatgtagcaagtgctgctggaggagccgcagcaagttatgcagaagatctagctaagatcattgatgaagacggctacattaagcaacatattttcagtgtagataaaaccaccaggtattggaagaagatgccatccaggactttcctagctggaggggaggtcagtgcctgggcgccaaagcttcaaggccaggctgacccccttgttaggggctaatgcagctggtgactcagttgaagccggtgttcatttatcattccagaaattctagggccctcaggattacgccaaatgtactctgcctatgctcttaaatggaacaaagcctggatgacagcacgtctgtttacagcatggtttactgaatatttcaagcccactgttgagacggactgcacagaaaacaacaaaatatttctcaatgacaatgcatgtggttaccaaagggccctggtggagtagattaatgtgttttcatgcccgctaacacatgatctgttctgcagcccaccagccaaggagtaatttcgacttttaagtcttgttatttgttattattattatatttttttgagacggagtctcgctctgtcgcccaggttggagtgcagtggcgcaatctcagctcactgcaagctccgcctcccgggttcacgccattctcctgcctcagcctcctgagtagctgggacgacaggcgcccgccaccacacctggctaattttttgtatttttagtagagacggggtttcaccatgttagctaggatggtctcgatctcctgacctcgtgattcgcctgcctcggcctcccaaaatgctgggattacaggcgtgagccactgcgcccggccaatttcaacttttaagtcttattatttgttattcttatttttaaaatttttagttttagagatggattcttgctgtgtcacctgggctggagtgtagtggcacgatcatacctcactgcagccttgaacttctgggctcaagtgatcctcctacttcagcctcctgagtagtggggactacagatgggcaccactatgcctggttcatttttttttttccaggtttttagagacagagtcttgctatattgcctaggctggttttgaattccaggcctcaagagatcctcctgccttggcctcttgagtagctgggagagtcactgcatctggctaattttttgtgttttttaagagacagggctgtgttgcctagcctggtcttgaacactggacctcaagtgatcatcctgcctcagcctcttgaatagctgggattacaggcatgtgccaccatgcccagctctaagtcttattaaataataaaaaatagaaatacatttagaaatacattttgtaggctgggtgcagtggctcatacttataatcgcagcactttgggaggccaaggcaggaagatagcttgaggccagtttgagatcaacctgggtaacatagtgagaccctccccctctacaaaaaataaataaaaaaataaaaaaacagaaatacatttgatagcaggaacaatggcaacaaaggatttagactatgacatagacttggctgatagagcaccagcaggctttgacaggactgacccccatttttttttttttttgagacaagtttcgctcttgttgcccaggctggagtgcaatggtgcgatctcagctcaccgcaacctccgcctcccaggttcaagtgattctcctacctcagcctcctgagtagctgggactacaggtgcctgccaccgcgcctggttaattttagtatttttagtagagacggggttttaccatgttggccaggctggcctcaaactcctgaccttgggtgatttgcccacctcggcctcccaaagtgctgggattataggtgtgagccaccgtgcctggcctgaccccaattttgaaagttctactgtggaccaaatgctatcaaacagcatcacatgttacagagaacagttttgtgagtgaatcgaagcagaaaagttcattgttaccttattttaagaaactgccacagccactttctacaaccaccaccctcgtgagtcagcagccaccaccactggggcaagaccctccaccagcaaaaagatgaggatttgctgaaggctcagatgatcattagcatagtatggggccaggcgtggtagctcatgcttgtaatcctggcactttgggaggtcaaagcaggaggctcacttgaggctaggagttcgagactagcctgggcaacatagtgagattccgtctctacagaaaaaaaaaaattaaaatatgtacatggtatttttagacatatgctgttgtacactttaatagactacaggatagtgtaaacataacttttctatgcactgggaaaccaacaaatttgtgtgactcactttatcaagtggtctggaattgaaccccaaatatctctgagacatgcctgaatttatattgtttgctctctgattccctcactagattgtaaactccctgagggcagggacttttgccttttttattcagcctttggacagtgcctggtgcactgccgccccttggtaaagtggtagcatccatgccggtagggatcttttaagatgaggagtgggggccgggcgccgtggctcacacctgtaatcccaccactttgggaggctgaggccggtggatcacctgagatcgggagttcgagaccagcctggccaacatggagaaaccctgtctctactaaaaatacaaaattagccgggcatggtggcgcgtgcctgtagtcccagctactcgggaggctgaggcaggagaatcgcttgaacctgggaggcagaggttgcggtgagccaagatcacaccattgcactccagcctcggcaacaagacagaaactctgtctcaaaaaaattaaaataaaataaataaaaagatgaggagaggggacatttccaacaaaacaagtgactgcacaaaggagtggggaaggggctggacccaggccctagggactccagagctctgccctttgtcctgttccaggcggctccccgaggactgggctgggtggagctggcaggaagggatgctgaggttgccagcaactcgccaggaatccctggcagagggcactggggcaggggtaggcccactggggccgtgggtaaggactaggggagaggtagggcagaggggatttggctttgggtggtgtcccactgactgggcactggacctttctttgccctgaagagtttctggacagctgaatccgactcctggggactgagcaggggtaaggagggcggtggggaaggaagtggggtgggggtggatgggggatggaggaagggccaggtgtggggcctgggaggaagcaaaggcttctgaagccaggaagcctggaatcagatgcaggtggggacaatgagtggctggatccccgagagtgtgtgcataaaagagcaaacgttgcaccaacagcctctgcgtgcctggtctctttctctgtgcgtgtgtgtgtttaatttaaaaatagggatcgagtctagctgtgttgcctagactggtctcgaactcctgtgctcaagcaatcctcctgccttggtctcccaaagtgctgggatttcttttcttttttttttttttttcattctcaaaggaggtgatgagatttctttatgtgttttatgtgaagtgactcatgtcgcctgccccacaacctatgagggagagaccattatcatcccttttggcagatgacaaaattgaggcacagaaaggtgacataacccccggggtcacacggccagcagggggcagctccagggcagagctgctgatctctgctgtgtttctgtgtgctgctccctctgtctgtgcttcaaagtatatgctttctggtcgggtgtgagtgtgtctggggttcacgtgtacatatgtacctctgcaggtatgtgtcatggctggcgtgtgtcctggcctgtgtccgtcggcactggtacatttgaaggtatgaatgtttgtatgcctgtgaatgtatctgtgtctctgtttctcttggcctgtgagcttgtgtgggcgtgtttgtttatgtatgaatggatatacatgcttgtgcgtgtcttggtctctgtgtgtgtgttgagaacaaacctctccccatttgctcaagctggaacccaggatgtcatcctggccacctccccaccccccaactcccatgcaatccatcccctagtcctgcccactatgcctactaaaggcctctggaacctggcccttctccccacctccactgcctcctccctggtccaggcggtagcatcattacctgggtgactatgacagatctttatatatttctgattttgttctctttgatttgttgtccacatagcagccacaggatctttttagcacacaaatctgttcacacacttccaacccttcaacaccccctcccttgctttcaggataaagcccccaatcctgcacatggcctcccaagccaggtaccatcctcctctctctctctctttttgagacaaagtctcattgttgcccaggctggagtagagtggtgcgatcacagctcactgcagcctcaacctcctgggctcaattgatcctcccacctcagcctcccaagtagctgggactacaggtacaccccaccatgcccggctaatgtttgtgtttttggtagagacggggtctcgctatgttgcccacgctggcctcaaactcctggactcaaggggtcctcccaccttggcctcccaaagtgccaggattacaggtgtgagccgctgtacccagctaccatcctcctctcttaaactgcctgccctgtttcctcttcctcttcctcctggccctggctgagctccctctgcactgtaactcagtgtttcctcaagcctcgggtctttctccatactgtcctctctgttcccctgcctgccccctgcacagcacttaacgcctgtccatcttgggtccaatattgcctccttgggaagcctctcaattctatcttcccagggtgtttttctctgttgtatttatcacagtttacaatcatagtcttatctgagtaatatctgtgtccccagctcaactgtgaatctgtcagcccaggcctggcacagctcagtgttcagtgaatgtctgctgaatgaatctgtgtgactggaacctcttgggcccagaatcaagtttgggcccacagcagttgtgcgtccacaaactccctgccccgaggaggctgaggcagccatctctttgccctcactggccaagtaaggaagcccaggcggccttggtccctcagagccccagtgtcgtcatctgggaaatggggtgatcctaaggacactagcctcatccagttactggcaagatgaaactgatgacgaggattgctccagccagcccagatgcccttgaggcaggagtgaggtctgattaatttatctaaagcctggcacgagggcggggcttcaggaaatgacaggcaaatcttggagtttgcaggaatgagcctttgtgaatggctcgttttgcagggagccctgcccaactggattctgactcctcatgacaaccctaagggaagcgtgattattatgatctctgttacagttcacacattccttcacttattaatccaataaatatttgagtgcctatttgcctggcataccaggctctagaaatacagggtaaacaaggcagatacagccctgcttttaggatgttcaccgtccggtggggactaacagtaacaataaccttcacttctcctgagggtttgctgcgtgcctgtgccaaacgctctacattcattctaacctcacaaaaggaggtactcctatcatcatacccattttagagctcagaaagctgaggcagggaaagagggagtctcctgcccagaacatcacagctcccagcctgaggaaccggatctccgacgcccacgtttcttaactacagtctgtactgcctctgggtatgctatactggtgtgaggctcagtgtcttgctgtgacagcgagtgcccttgggctccagtccgtctgccctctgagcctgtctgagcctgcgtgtgtctgaagccaactccaggtctattctgggctaatgatgtgttctacggcaggggaagcaatgagtttggggtccctggggctgaggggtggtgttagtttccttcctgcatgggaacctcccacgggtccccatgctgattgataaatgcttgtaactgaggacctgcccctgcctgaggcttgcagcatttctgttggtctgtcagcctttgttccgccttttgagacctgaaaataatgtgacaccctagagaaatgaggccttcccttttgctgaggcaggtgtggaggtctgaagccaagccagggcccgttgtcctggaaagggtaggggtcagggctaggccccagtggagccggctgaagcgggttgactgacaatgaatggatggatggatggactgacttgccgggtgggaggccgggactgcgatgaactttactggccccgctgcactctccactatgggcaccccttcctcctacctctccttgactcaccgctagacttcctctttgagtaacacctgctaacctccttcccccttatcctctcaagagcgctggagccctgaacatcggcgcttgaagcattccccaggtgggaaacactgagggcatccgttgcccttggtcacacagcgaatacggaatccgagcgggaaccctggtccacgaagctcgcattccggactctgctcccaagccgatccgggcgtcagctagtccctgtgccagggtgggcctctcggctgtcacatcacccccttctcacaatggatcatcccgttgtccccgcaagcggcaatgggccagtccgcggacccccccaactccctgtggcagtgggccagtccacgctgtccccactgccccgtaggatgtacgaggttccttccgggctgctgccggtctccgcgcgctcacctttggccttgtcttttcgccaccgccggcgaccgtggctccttgagccctctttggcattcttcgaggccggggccatagcggcctcggcgggctccgttcccccggccaactccatcaattccccgcggtcctcccgcgggggccaattccagccgcgaggccctgcccggagggccaatcctcgctacacactactgtcgggcccccctattacccaatcccgagcttgctcttctctgggtccagctccctaaccaattctggtctccctccgctgccgtgctccgcccccaaccgccagaatttaagatctggctccgccccctaccgcgcattaaagggctcgcggccaacaaaaaggcaaccccgggggtggcgaaaagcgtccttcgggcaggactagtgcggagccccgcggggagcaccccagcagggaagtcccgatcttcccacgtgctgggaagcctcccatgtgctggctcagtctcgccatcccactcaccttcccagggagggatgccctagcacgcggcccggcccgccttttgaagggggaaagtggggcgcctctgagcctctgcctggggtgggggcgggccaggtcctctgccaactcaaagacgaggcggggcgccagcgctggaggcgtggctgtgcctgagagccgttggaggagggagccccgctttccctctcctgtctcctagttctcctattgcgcttttcctgggggatctttctccctctgtctccgccccctaatccatgctcccgataatgagggtgggggatggtggtaggagaacgctcggcgcctgcgcactagcttcaggccgcgggccggcccaagagcggaggtagagggaacgacgcatgcttgagaaatggcgggaaacagaggaggctcgaggcttgctcacacgcacacagccaactgcttctggaccgccttgctcacacgcacacagccaactgcttctggaccgcctgaaaggcaacctcgcccgccgcggtggtgtggggcgggcatcccttgagactgtgctctggaggcctggagaaacagctttctatcctcagcactggggagagcaggcctcaatccctgcctttgcctgccgcccctcttccttccctctcaaagcatacccagcagccccggcgctgagaaacgcgttactctcttatcagctgtgggagagacaagacagactggcctctgggcggaggggccgccattgcctgccctctggaccagggcctcacagataccctcagcttcaggattagggctgcgttggtttttccccccacatcaggggacttcaacaagtaacctccagttccatagataaaacttgtattccccccttctccatggcaggggttttgagcctagagaaggaagatcggagcttcctggggctcctgtgaagcaggcagggggcagcactgggccccgggaagaggcggagaaggcgagggagtgcctgcggtgagcccagagccttgggcccgttatcctctgatgctgctcccccaactttcctgccgtcagtccctgaccttgcctgagaccttggcggctcccgcacctctctcccggctcctccttgctgagaacacaacccgcaaggcccttccgcctggctggactgagtcccctatggaggcagcctggcagggagcaggtatcttcctggcagaagaggacagacctggtaaactgagagactgttgatgccccaatgttctgcctagcctgcctggaaactccagaagggtaaggtaccgtctttgtattgtattgctgggacttacgcccgtgtctaccccagagctggtgctcagtcagtttctgtggatggatgaatgaacactggcaagagggccgctttcctggtctcctggtccctagctcagagtgccttcccactctgggatttgattttccccaaatcctctatagggaggcagcctggtccaggggagaaagaccccggcttcaaatcctgactttgccacttcctaactgcatggccctgtgcaagaacccttacttctttattttctacctgatgtcctcatttctaaaatgaggatgttggccaggtgctcggtggctcatgcctgtaatctcagcactttgggaagctgaggtgggaggcttgcttggggccaggagttcgagaccagcctgggcaacatagcgaggccacgtctctacggaaaatgtaaaaattagcggggcatggtggtgcacttgtagtcccacctactccggaggctgaggtatgaggatcgcttgagcccaggagtttgaggctgcagtgagccatgatcataccagtgcaccccagcctgggcgacagagtgagactttgtttttttctttttttgagatggagtcttactctgtcacccaggctggagtgcagtggcacgatctcagctcattgcaacctttgcctcccgggttcaagtgtttctctgcctcagcctcccgagtagctgggattacaggcacctgccaccacgcctggctaatttttgtatttttagtagagacggtgtttcaccatcttggctaggctggtcttgaactcctggcctcaagcaatccatctgcctcggcctcccaaagtgctgggattacaggtgtgagccactgcgcccagccttttttttttttttttttttttttaataatggggatgttgatctttatctcaggattgttgaaggatgaccagagctaacctgatacaccgtaagtttttagtattttttaagtaaatgaatgactgtccctgagaggcttcaattcctccagattcacactcacctgtatcctggtagtgtctgtgattccgagcactggttttctcatgtggcgacgtcccactgtatcctgacatcactttataaccagattttcctttgaagcctagcttcactccctgggccaccattccacccatcgtggctggagaatctgtgtctgaagatgatcccacatctgattctgactcagaatctgtgacccactcagaaagtgccttccactctagggctgatcgctgtatggatagttcctgaagttttgttagaaatcccagctctgtcaaagatccctgcttggatttggctccctggactggcgttgtttgcttgtctgactgttcaggtgtctcttgggacgtagattcagtcggggcagatggctcccttttggctccaggtttagcctgggccgcaggtgttgattcagcttcttgttgagctggaggtggctctcctggcccaggccctggctgggctacatgtctttgtctcaatgctggctcctgttgagttatagattcttttcctagcccaggtccctgctgggaggcagcttcctgttgagtgagcagcaccctttggatgtaaggtgattgctgtggtgcgggcttctgtggggcaagaaattcctcttgtgaagcagatttttgttgggctctaggttccttctgggattcagcatcatgttgtgcaggggtctcctgctgggtgaggggtctttggtttgaagcaggcttctgttgggtattggatccctgcagagtcttcgattctggctgggctatgggtgtcttttctggcccaggctctagcggggttataggcctctggtgtggttcaggttgccagtctgacctagacactgacttagaacctggctccattgttatttccctcacgggagatattgatcttccaggttctatccttctgggctcccacccagccctctctcttcacagatctctcattgattcctcatgatggcacttcctcttgggtttcactccatcctagcatcactggtcttcctttttaaggcagctggcagttggccgatcacagctggcccccactaagtaatgaactctgtgcctctttctttggtgggaggattaggaataggaggaggctatgtgcctagcactctcttacaagaagggaggggcttgctctcttgtgtcataaatagggccccaccccacccaccactccgttaaaatgtttcttctcataaggcaagcatcccaatttaggcctccgtgtcatctgggatgacagaagccagatgctggatgagtgttccttttttctctttccttctaatgtctgaggaaagcgtcattcagggggcagtctctgtagttgttgtaataattatttccctctttgttcattcctacaaatggttgccagattatttatttatttacttattgagacaagtctttctctgttgcccaggctggagtgcagtggtaccattttggctcactgaagcctccacctcctgggttcaagcgactctcctgcctcagcctcccaagtagctgggactacaggcgtgcactgccacgcccggctaatttttatatttttagtagagatggggttttgccatgttggccaggctggtctcaaactcctgaccttaagtgatccacccccaccccccgcccccgggcctcccaaagtgctgggtttacaggtgtgagccaccacgcccagccaggttgctagtttaatttccttatattgtcattctgatcatttaactctcatgttaaaaactaatgtcatgccttcccacttttatagcttgaggcccttctgaatggcatttgagatactccatgccatctctctagccctgaactatgatcctgtactagattggaaactcacagaagacagtgaccactgatgacaatgactgataatgatggtggtaatggtgatgatagtagtcataaataccaaaggctgcctaagtgctaagaaactgtgccaagttttttttttaaacctatattatctttaataagaccgtgtctggttcattggtatgcttttttttttttgtcccacctcgctcttacctcagaaagatttgtcgaatgagtgaaagatgaacaagtaggccaatggagacagagtgagggtcttggtggggataagtatgtgtagaatctggattcagtctgcagtgaatagggtaaaatgggtcatctggttgtgaattggcagaccccatttgaaggaaacaattttgatctgtgacatttaaaaatatttattgacttctgtttgctactttcctgattgcatttaaggttaaatgacactagctaggaagctacagtttcctggaatctttcaggtaattaagcctaagcctgggtaaggggagggcacaggctaagactgacgagagaagaagacactagagagagcaacaaacaaaatgatcttgaaaaacatgctttttgagagcactggaatgatttaggggtgggtacagtgggagagtgaggtgggagaagaagagtgtctggtaggtgtgctcactgtcttcttggctgagaatgtttaattggaagagtgggcgctcagagctcctacaaaggcagagcaaagcttcttagctgacattgtttgagaaattgctggcaggctctggaatgcttgtttggctttctgtggtgcctttggtgtcctagggtgcaaataaaggggagaggctagtgttaaaaccatttttaacatttcttttttttttggagacggagtcttgctctattgcccaggctggagtgcagtggcaggatctcaactcactgcaacctctgcctcccgggttcaagtgattctcctgcctcagcctcccaagtagctgggattacaggtgcctgccaccatggctggctaatttttgtattttagtagagacagggtttcaccattttggccaggctggtctggaactcctgacgtcatgtgatccacccacctcggcctcccaaagtgctaggattacaggcatgagccaccatgcctggccttcacatttaatttttttttgagatggagtctcgttcagttgcccaggctggagtgcagtggtgcaatcttggctcactgcaaccactgtctcccagattcaagcgattctcctgtctcagcctctcgagtagctgggattacaggcacccaccatcatgcctggctaatttttgtattttagtagagatggggtttcaccatgttggccaggctggtcttgaactcctgacctcaggtgatccacccgcttttgcctcccaaaatgctaggattacaggtgtgagccactgtgcccagccaacatttaatttttatgagagttttaaaaattataaaaataagactcatccagtggaaaaaaattttaaaatccagtaaaaagtaaaaggactcctcccaccccagcctctacaacacattttccagggctaaccactgttaatagtttgctacgtatttttccataccttctggtatataaatacaatggtttattttaaaaacaaaaatgagattatactatacgtattgccttagtcggcacctttaagaaatctggccgggcatagtggcttgtgcctataatctcagcactttgggaggccgaggtgggcagattgcctgagcccaggagttaaagaccagcctgagcaacatggcgaaatcctatctctacaaaaatacaaaaattagccaggcatggtggcgtgtacctgtggttccagttgctggggaggctgaggcaggaggaatgtttcagcccaggaggtgagccgtgatcatgccactgcactccagcctgggtgacagagcaagaccttgtctcaactgcgcccctccctctgcaaaaaaaacaactgaatctattattgcaaagtattatatatctatagaagttcatagaaacctatacatgcaattcaataaatagttataaagcagatattcatgaaactactacctaggcttagaaatagaatattgtgtccgggcacggtggctcatgcctgtaatccctgcactttgggagcccgaggcaggcagatcacctgaggtcaggggttcgagaccagcctgaccaacatggagaaatccatctctactaaaaatacaaaattagctgggtgtggtggcgcatccctgtaatcccagctcctcaggaggctgaggcaggagaattgcttcaacccgggaggcggaggttgcagtgagccgagattgcgctattgcactccagcctgggcaacaagagcagaactccatctcaaaaaaaaaaaaaaaagaaagaaagaaagaaatagaatattgccaacagcacccctccttttctgatcactgctttctctccccctcacagtgataatcttgacttttatagtaattatttactttcttttctttattatttaccacctatgtgtatagattcctaaataatttagtttattttttctcatttttaaactttatgtatatattatggtctgaatgtttatgtctctccccattttttttgtttttgtttttgagatggagtctcactctgttgtccaggctggagtgcagtggcgtgatcttggctcactgcaacctctgcctcccgggttcaaataattctcctgtctcagcctcctaagtagctgggattacagatgtgcaccatcacgcccggctaatttttttgtattttaagtagagacggggtttcaccatgttggccaggctggtctcgaactcctgacctcaggtgatccccctgccttggcctcccaaagtgctgggattacaggcatgaaccactgcacctggcctcactttagttttaattcacattttccttgtaataataaggttgagtgccattgcatctgtttattagctgtttgggtttcatcatctgtgaagtggctattcaagtatttttgcccgtttgtctgttgtatttcctgccctcctctcactggtctgtagcaattccttatatatgtattctgaatactaatcctttgaaggttgtgtatgttacagatatcgtctcctatttggcagcttgtcattttattcttttgatgatcaaaatttcataatctcagtgaagtcagatttatttactcttttactttatggtttgtgcattttgtattttgtttaagaaaggctttcatacctcaaggttgtgaatatattctcctgtatttccttgtaaatttgtctttcaaatttagatctgtaatccacctgaaacttacgttaatgaaggatgtgaaatagggggtctctacatcatttttttttcattaatatattgtggatatctctccagccaacacataatgatttatctcattattattattattatttttattattattgttattattatatttattttagagacaggatcttgctatgttgcccaggctggtcttgagctccttggcttactggatcctcctgcctcagcctcctgagtagctaggattataggcctgagccactgcccctggtttacttaattatttttgacagtaattagtttttcccaatttgcctttgaagaaaatttcccccatttatttgtcaatacaaatactgctataattaatattcttgtacctatattttgagcatccatgctagtattccattgttgagatttcctaaagtaagattactaaagttattatactcatttacaattttgatacagccaaatttattttacttccgtcaatagtgtataaggatcctgatatatcccattcttgataatatcataatatcaatcagtttaacatttgccaatttagtttttttttttttttttttttgaggcagagtctcactctgtcgcccaggctggagtgcagtggcatgatctcaactctctgcaacctccacctcccggattaaagcaattcgcgtgcctcaacctcccgagtagctgggattacaggcatgcaccactatgccccgctaatttttgtatttttagtagagacggggtttcaccatgttggccaggctggtcttgaactcctggcctcaagcaatccgcctgcctcggcctcccaaagtactgggattacaggcatgagccactgtgcccggctgccaatttactttttatatgacacttaaaaactggtagactaaactgggtgtggtggtgtgtacctctaaccccagatccttgggaggctgtggtggaaggatcacttgagcccaggagtttgagaccaacctgggcaacatggcaagaccccctactcaaaaaacagaacaaaataacaaacacaaaactgctagactagggaggagtcaaattctgtttgatgctgacactggtgtaatcttcagagattaatgaccagatctccaacagccccatctacccccactttggtaaacagtgaggttttaaaatctaagaatttggttaaacctttccagtatcaggaaaattgtatcctgcttttcctctcttcctatttcccgacaaggtgacattgagtagaaagggctgagttgtgtgcttatcctggtcttaatttcacctcttttttctattctcaacgtgcttcttccctagtgatttcacggagtgactctggtataaggaaaatcatcctttggaaacttacttgttttcttcacattgcccttgaaatgatcacaggggcactgcttctttggcagcccagacactgtcatgaattttcttctcggggctctcaggaaccaatctggaacaacagcattgctgcttagatgggagagttaatacatttgataggagggagtaggacagagctttaatcgccatcttctgtgccttgcatttccactgcaatggggtgggaaaaggggtcaacagagaacagtgtccatccagctatttgaatgccagtatttctgagttgtttttcctgacaactttgggcaaggtttgggcaagggtttgggcaagggtttggtggcaggtttggagggtgcatcagaatatcattactccaaagaatgaggagtaaggcttgggtgtctgcttttcagtggctactttcccttggggaagccattttgcctctctgctttcagtcttgcctgtgagtaaaataaggctgagaataggattcaggaagcttttggaaggccaggaaaaaataaaaaggcttttggacggtagctctgggttcttcaggaaaaggataaggggcagggcgcagcctgacatttggctggctttcccctagaccttggagaagtccagttcttgcctgagagtcaggaagaaagtgggcacaggtgctgcatgtggcaggctgtggagaggggaatgggtgaggtcagctgagataacatctgcattggtctcagaggggcccaagggagagagctggggtcatggtgatgccatcgctgttgttgttgctgaattactgacctttgcactcacattcttggccgccttcctggagccatctcctagaagcctggcctcggtccctgtggcctctggcgacccctgtcggaaggaaacaggtcacatccagacactggaaagggcacagaaatgatcctcccagcattgttctacctaggtcagcacagttccatttttccatttttacttcaagaatctaggttacttcaagagatgaatattttatttttatttatatttttgagatggggtcttgctgtgttgcctaggctggtcttgaactcttgggctccagtggtcctcctgccttggcctcccaaagtgctaggattataggcgtgagccactgtgcccagctgaggggtattttaatcgataagggattgaggtttaaaatctggcctatacataagcatattcaaaaatttaatgattaaaaaaatctggcctagagaaaagcttagctgaaggtaggtggagaaagaatggcttctagatggaagagatgataaaaggcaggggtttgtcgaaacctcctgccctctcctcatacctcacattaaaatcctcatgacttaaaagagtgagagcgaggaggagattattccttaaatcaagattttcccttgacctccaagttgctgggttttttgtttgtttgtttgttttttgagacagagtctcactctgtcatccaggctggagtgtagtggtgcaatcacggctcactgcagccttgacctcctgggtttggttggtcctcccatctcagcctcctgggtagctgaggcttcaggcatgcaccaccactcctggctagttttttgtattttttgtaaagatagggttttgccaagttgcccaggttggtctggagctcatgggcgtaagcgatccgcctgtcttggcctcccaaagtgctgtgattataggcatgagccaccacacccaccccaagtagctgtatttgaatccagagtcccagttcaactattaaacgatggtatttacctttgttcctctggaacaaatacattcttcttttggcctttatccgagcctgttttattttccgattctatcttatctccattttttgatacttaaaatattcctatgacaggctgggcacggtggctcatgcctggaatcccagcactttgggaggctgaggcaggcggatcatgaggtcaggaggtcaagaccatcctggctaacatggtgaaaccccgtctctactaaaaatacaaaaaattaggcgggcgtggtggcgggcgcctgtagtcccagctactcgggaggctgaggcaggagaatctcttgaccccaggaggcggaagttgcagtgagctgagatcgtaccattgtactccatcctgggcgacagagcgagacacggtctcaaaaaaaaaaaaaaaattcctaagacaatcaagaatgatggtttatagacttgagattctcaagtaagagcttggctcagatgacacttcctttatggtagtttctgatatttcctgtcaacatgaattataccttcatatggttcccattgttgttgaatgcagttctgttattgcactgtaatgttgttgtttgaaatcttttatggactgaattgtgtctcccgaaattcacatgttgaatccataacccccagtacctcagaatgactgtatatggagataggacctttaaagaggtgattaaaatcaggctgttatggtgggccctacaccagtctgcctggtgtccttataagaaaaggagatttgggctgggcgcggtggctcatgcctataatctcagcaatttgggaggccgaggtgggtgaatcacaggtcaggagtttgagaccagcctggccaacatagtgaaaccctgtctttactaaaaatacaaaaatgagcagggcatggtggcgcgtgcctgtagtcccagctacttggaaggctgaggcaggagaattgcttgaacccgggaggcaaaggttgcagtgagctgagatcataccattgcactccagcatgggcaacaaagcaagactttgtctaaaaaaaaaaaaaaaaagtaggggggatcctagagagctctttcattctctttccacctcttgaagataagaggagaagtccactgtctgcaacctggaagaggacccttgccagaacccagctgtgctggcaccctgatttcatatatccagcctgcagaactgtgaggaataaatttctcttgtttatgccacccagtctgtggtattgtgttatggcattcctagcaaactaaaataaaatatttctccttcactagactctgaaccattggttcagtagtcattcaggtacgtggttcctaacacatggtaggcatttggcaaatgtttgttcaacacgtggatggataagttgtttggagaggacccttagagatcatatggttcaattcaggcctcctacttcccagacttctgccacacagatggagggggttgcgtcatttccccaagggctgcttttccaatgttctcatgtgctgttttgagtgttatcaaagtaatttaagcaggcataggtcctgccatttaaacttttctaacatttttactcttgcctgacctctactcctagttccagagaaaaaccacagaatattagaccttgaaggaaatcccagagattatttaattgaattccttaattctgaagtttttttttttttcagtctaaatgtaatttaactgttggagaaaattttgaaagtacaaacagagaaattattattcttaccaactgttggtattttggcatatttgttacctacatatgctttttattaatatagtgataaccatagcatgtaaacacattctctttttccattcataggcatgttgctgtgtcatcttcataacacatttttaatgaatgcataatactctcaataattatgtgttccaaattatttaactgctttcccattgctgaatatttagaaagttttattttttagatgttggtaaatttctttgttcttgtaactgttttccaaattttagattattttcttgagagagagttcccaaagtggaattactgggtcaaaagttaagaattgctttcagaagagctatactaatgtttaaattttttttcatttaattatttatttattttttttgagacggagtctcactctgtcgcccaggctggagtgcagtgttgtgatctcggctcactgcaacctctgcctctcgggttcaagcaattctccttcctcagcctcccaagtagctgggattacaggcacccaccaccatgcctggctaatttttgtatttttagtagaggcaggttttaccatgttggtcaggctggtcttgaactcttaacctcaagtgatccgctcccctcggcctcccaaagcgttgggattataggcatgagatgctatgcctggccactttatactttttctctaaacaaatttattttgcaaaacatcctcatcctatgcaatattatctgtgaaattacaggtttgatgtatgcttagttttttcctaacatgcattggaataaacacataaatattaaagtaaaaagaagcttatttactttccacctaaaatcagttttgggaaccactgatacagtggcataagcatgcactttatatccacataggcctggggtcagctactggctctgtcacttaactgtcgacttggacaagtcacttggcttctatgatccttgattccctgatttgtgaaaggagggtggtaaaatcctccttgcagagttgttgggaataagtgagctgctgtgggagcccagtgtccaggcgggtgttgagtacatgatggttatcattgtgtttattgctgtggaattctggttattttccaaagtgagtgtctatgctggaatattgggcttgtggctttctgctgatgtggatgtgtaaagaagttacttccacttgttaggatttgtggtgcatctgtcattattttcacttcccagatccactacatatttgctttgtgattttggacaaagttgtgtaacttttctgtgcctcattttcctaatttgtaagatgtggttaataatattcctcccttatccacaggggatgcattccaagacccccaagatacttcaagtctcagatagtaccaaaccctatatatatattttttctacacatatacacttacgataaagtctaatttatgaattaggcacagtaagagattaacaataagatagaacaattttaaaaatatactgtaataggccaggtgggggctcacacctgtaatcccagcactttgggaggccgaggcaggcggatcacgaggtcaggagattgagaccatcctggctaacacggtgaaaccccatctctactaaaaatacaaaaaattagccaggtgtggtggcgcacgcctttagtcccagctactcgggaggctgaggcaggagaatggtgtgaacccaggaggcagagcttgcagtgagccgagattgcaccactgcactccagcctgggcgacaagagactctgtctcaaaaaaaaaaaaaaaaaaaaaaaaaaaatatatatatatatatatatatataaaatacacacacacacacacacacacacacatatatactgtaatgaaaatgacgtgaatgtggtctctctctctctttgtctctttctcaagataacaatatttttggaccactgttggcgggtaactgaaactgcgattaagtggggactactgtacatgagtgtgcgtgtgtgttatttcccagctctgaccactagagggcctagaagcaccagcacctactagcaatggacctatcagtcagtgcccatagtctgtaaatatcattctcccatgaaaggaactagggcttccaggaaaaatagctgatccagggctggggcagaaaaacacaagaggagcccaaagcttcttgtggtgtcagaaagtaaggagctgctcaaaaaatggtggagatgtgtctaaaggtcacagaagccaactagaaggagctcccaatggccaattttgggacaatatgagcaacataataaataatgatagtagtggattccaacccataaatactcatgagtccatgctgatataaataaataactgaacaaataaataaataaggaagaggctaggcatggtggctcacgcctgtaatcccagcactttgggaggccaaagtggggggatcacttgaggccaggaattagagaccagcctggctaacatgacaaaaccccgtctctactaaaaatacaaaaattagctgggtgtggtggtgtctgcctgtagtcccagctactcaggaggctgaggtgggaggatcgcttgagcccagaaggtggaggcggcagtgagccaagatcacaccactgcactccagcctaggcaacagagcaagactctatctcaaaaaaaaaaaaaaaaaaaaagaaaaagaaaaaggaataactctttcttatggcagaattccgattaaataaatgtagaaggaacaatggaagtagaaaatcactatttggccaacaccacagtaataattctttataggaaacaatcatccatagattctaaaagttaatattaaaagtatgatgatgccataactggtgaataacaagaaaaaaaaaagtatgatgagaagaaacaggctatttacatatttccaaagtgtctctccacaagatacttattaattacaataagatgaatagtaactttacagtagagaaacctggcagacaccacctgaaccaagtgcttaaagtgaacctcatcagtaatgagagatatcgacatcctggggctcttgctgggatgtccagagaaggatacatcacttctgaagtattcttgcccaaaatgtgtagccggaaatatcagacaaacccatattcagggggcattctacaaaacaactggctagaactcttcaaaagtgtcaaggtcctgaaagagagggaaagactgagaaactatcccaggttggaggagacctaggagatctgacattttattcagtgggatcccagattggagtctggagcagaaaaaggacatgagtgggatgattagcaagatttgaacatttgtagattagttaatattatggtatcagtgctaatctcctggttttgataattgtattatggttacataagatattgtttgaaaacaattggatgaaggctgtactggaactctatttttacaatatttttcaaagtctgaaaaatgaaaagtaagaaaaagtaagaaatgcattagatttgtgaggacaaatgagatagtaagtgtgaagtgattagaacaatgcttgtgatataggagttcttaatgtgtctgatattataagtaattttataattaaataatattataattaatgaataatctgttattttaagtaatttatttcctaatgacctcatatattctcacttatttctatttcccttaaccctgtgaaaagcatattgagcatgtatgtgattaagagataaaataagattagactttattctgagatttattttggggatggaggagctattatttcctttagccactaagtagctcagactcaggcctgcactgcaaaactttgcttggctgggaaacaagatttgagcccggccgccacccactcgacgtggtttgtgatggcgccccctggtggcgcagggagctttccccagttcctcaccctcgtgctttaggagcgacttagaaactactcagtccatttattaaaccctttctaggacacgctgcggatcatttaatcttcacaagtgtgtgtgacaagtggtattttcttcattttaagatgataaaactgaaactcaaaaaagtgaggcgacttgtctagggttgcaaagtgtgtggcagagccaggatctaggtccccctgacttccaagctgagtgtaaaggtctaggtgagtctaaaagtgtggccatgcagagaagtattggtgtagagcagtggttgttgaccaagggtggttccccctccggggtcatttggcgatgtctagagatatttttggctgccataacaggggtttggatgagggagaggggaggctgctattggcatgtaggggagagaggccacgcggatgctgctgaacatctcacaatacacagaacagcccccaccgcaaggaactgttcagcccaaatgtcagtagagctgctatgaagccctggtttgatttagcaacctgaggatgcattcttgcagttagctaatgtttgctgagtactgagctggatagcgtgagggatatggaaacagtgcaccagtctgtgtcaccaagtagtttgcagcctagaaggacagggggtgggggcaggaaaggcacatgaaggccctcaatataaggcagcagatgataagtgcaagaagagagtgtccagcagggctaagccagcgctcaggagggagaccacatgtctggctgtgggaggaactgaaggaagctgtgggaaggtggttttgagctgggtgtgtgagcaaagttgaactggtggaaaaacacaatacctgttcagggaagggcaaacaggttagtttggttggagaaatagtatttttagtgagtagagggaggtacactagaaaggcaggttggggctacagctttgaatccaggcagaggactctagcctgggtgtctgtcatagtgatggaaaagtcttccctttcagaacagtggtctaggccctagggctatggggcttaacagcttccagagcactctctctacaaaggaggggatgttggaaattggggtggagaagggagaatgcctcctgattttaggaccaagttgatgctgagtatgtaacatagccatttcacctcaaagtggcctttggggagatggtgctcacaagcggaaatatacatggggatcaggtcttttctgcgtggttgctctgtgcagggctgggccactttatagtgaaagctggagcagatttggaacccctaagctaaagtcggcttcccaaaatgtgagctgttacagcagggcttgctatggataaagcttcaaatatggacactacctggtgacaggctttttctagtttattacgttaccagtaaatagcattaagacatgttggtggcattccagtgcactgtaaagaatagaagcaaggacttcctgatcttctataaaggtaccattgccttcaacactctcccaccatcatcattaagtttagccatgagaattatgttactcttttggaaaagtgttgggggagaaggcatgggagcaaatctttgttgagctagtatatacatacatacgtacgtgtgtgtgagggggatcagctacaattgcagatatcttcttttcttttctttccttttttttttttttttttttttgagatggagtctcactctgtcacccaggctggagtacagtggtgccgtctcggctcactgcagcctccacctcctgggttccagcaattctctggcctcagcctcctgagtagctgggactacaggtgcgtgccaccaggtctggctaattttttgtatttttagtagagatggagtttcaccgtgttagccaggatggtctcgatctcctgaccttgtaatccgccctgccttggcctcccaaagtgctgggattacaggagtgagccaccgcgcccggccagttgcagatattttcacatacaatatctcgtttaactctctcaacattgtttgggtgtaagtacagtttgctgtttttttgtaaaggaggaaactggcattgagaaaggctcacttgccccatcccccatagctaagagaagctgcattttgatgtgtctgtggcctgttttgccacatttctccccccgttttccccttcatagacagtcttgtttacctggattcaggctgctagagaccatggacatcagcattagtggcagcaacaggaggagggaagagattagaactttcatcgcaactgtcggtgcagctgtaagttgcttgaagaatataatggaaggttccctgctggaggctcctgatccctggggatgactcaggtcaggatactcagcctggtggtctatgctttagtcccaggccagcgttcccatttgagggcgagaacaggtgaggtgacgctgtcttgctgttacgtaacagattagaccatgtgctttatgggaatctgggaggtgaaactggtcaaacaaaagaaattcagcattcttaagaacataagaaggtgactgataacttggcagctgtgccagttctctcctgtactctttcccgcctcctcacaccccaatgcctcatgatttcttcctcaaatctttttttcttgcttggatttccttatacctttcaatgaccctctctatctgaatatttggcaggaaagtggatactaagtgttggtagaagagactttgacaaggtctgtttcccctctgtgctcctgctcccatccttggcaaaatatcggcaatagtagtgttgttgcctgggaagttgccctgtcctctctctgttcacaattccctccaattctgcagccacataagatggcagcagagcaggatccgggacaagaggcagctcccctgccgagaacaccgcccctggagcagtgggtgacaccaggcctccttgtgtgtccatcgggaaggtggccatggcttagttgttctggtctaaaggggagggaactgggttgggggaagagacccccagagctttaggtctcagagggtttgagaaacaggagccacaggagggaaggagccctgaagtgtgtttgcccagctgctggggcgcctggctccagcccttgtttggaaatggccccgggcaaaagaagaaaggtaataatacttgaagtaaacattaggggcatagaatatcagcactcactaaacttgacatttatttgagactttaggaaatgtgctcaaagggagaggagaggctgggcttgaatgctgggtgatattcatgggggctgaagggaaggctaacaagggagccctttttttggaagcctccaggcaggagtgagagcagggggtgtgactttatttccctgagagaaggaaagaggaaaggcatgagtcaaagccctttggttttgtttgaccattcttttttctccacgttttcaaattatctcggcctgttgacttgtcacagagttgattgtggactttgctactgcagtgtttataaagcactgcaggggccagggactgctatgactgagcctgtgtccaagttgaaggctcagggtgggcctaagcttgttctgatgcaaatcactgatgtggcttctttctggaaaattctaaaaccagggagatgacatccatttcataaagcctagagatatgggtgcagtcatctctcaaagtggcaggagtgcagggggactgagagggacttggttgggtggaacttgagctggagttgggggaggatttgggttggtggagggcagagaggagggccgtgcagagcaggggcgtgttgtaggagaggtgcctcctggagctcattggatggggattttagaggacaggagctgttcgtgttcatttttgtattgcttgaacttacacagggtctggcactttgggagtattctataaatgactgttgaatggaatgattgttttgtagcccattaactgggcctgatgtattagaaagtgtgcgaaaatgtagcccattagcagaaagaaaatcttactgaaaaaccatcccatgtacaaatggagcctggtgcggccactttacttatgctgctgagttctgcatcagtccacacccaggccaccgcaggggccgggagctcctcctcagacctacctcccgtgcctcagtctctttacccctctgttcttccaggtcctgctccctctggtttcccctccatgcacttggggtgggtgttgcatcctgtgtcccattggagggggcttccggtctgttaggtctattaatataaaacacccccaagacaaatggacttttttcttgttaacatcacaacttcttatgatgcatctcaagaacattatttgtgtcaagagtctctctgatgtacagaggccctccattcctcaggaggaggtaaggggaatttgggagaaaacaccgccctgcctgggttacttatttccctattctacagtgtacttggtagacattcaaaaatatttgttgactttgtccatgatccacatggctctcatatagtcatttattcacacatacattcagtgagactttgagcgcctagtgtgtgcctggtatttactagatggtggatgctgagatcaggtgtgctgctgtctctgaggagctctcactatacagtggcacctagggtgaccgaatccacctgccccactttacagacatggaaattaaagtgcagggaagttataggattagttcaacaacacagtcagtagcctcaaagttacaggagtaaatcaagttttctgacttgctggattttctattagtgtgcagctacctggctgctgcaggtgtagacgtggtgagctccgataggagagaggacgttcagagtgaaatgggagccctgagcaccctggattaaccgggaggacataccgggtccagctgtgaccgcacaaaggaccatcagggatatttgtattctctttttcactttgagcttgaaatgaagaaaactgaccccaggaaaccaagagtggaagatttttcacaggggattagtgagatgcgtcaaaaagcctgtgttggatgggtgcctgtaatcccagcactttgggaagctgaggtgggaggatggcttgggtccaggagtttgagaccagtgtgggcaacatggtgagaccctgtctctataaaaagcttttttgtttcttgttttaaaaagaaaacccttttctgatgtctgtcacggtgtttctcactgaatggtaatggtctgactttgagtgggtttcatccatagcctggagctctgtgaggcagggaccaggtgtgattcacctttgtctctccagtgacagtacacagcaggatccgataaatatttcttacaaaataaaactgaataaaaagtagacatctgcacaggtgtgggatgactaagcagcagcaggagcaggaaaaatcagtccccccagatcagctgatacagcgttcagcttctagataggggtgaggtgccaggacggggatggggttcctgtggctctgctgctctggggaacacccctaggattcagagtgtaggctgtggttgctgcacttcacttgcccgtgggaaagtgagcagtgggtgtggggcttcaggtgaccctacgtgggaaacggccgagggaagatggggtaggtggcacatagaggttgtttttttatttttttatttttatttttgagacgaagttttgttcttattgcccaggctggagtgcaatggtacaatcttggctcaccgcaacctctgcttcccaggttcaagcaattctccttgcctcagcctcccaagtagctatgattacaggcatgcgccaccatgcctggctatttttttttgtatttttagtagagacaggatttctccatgttggtcaggctgatctcgatctcctgacctcaggtgatccacccaccttggcctcccaaagtgctgggattacaggcatgagccactgtgcccggccaaggatgtttaccaatatttgaaggtcggttgtataaaaaagtgttagacttggctgggtgcattggctcatgcctgtaatctcaacactttgggaggctgaggcaggcagatcacctgaggtcgggagtttgagaccaacctggccaacatggcaaaaccctgtctctactaaaaatacaaaaattagccgggcgcagtggcgggcacctgtaatcgcagctattcaggaggctgaggcaggaaaattgcttgaacccaggagggggaggttgcagtgagccaagattgtgccactgcactccatcctgggtgacagagccagactccatctcaaaaaaaaaaaaaaaaaaaaggaaaagaaaaaatgttagtgtcacatgcatccatgtgaagagaccaccaaacaggctttgtgtgagcaataaagcttttaatcacctggtgcaggcaggctgagtccaaaaagagagtcagtgaagggagttagggatggggcagttttataggactagggtaagcagtggaaagttacagttaaagggggtttttctcttgcgggcatggtggggagatcataagactcattgtccagaagaagaatgtcacgaggttgatcagtagatcaattgggacagggcaggatcaagtcatgacagaatgtcataaggttggtcaatcggttaagataggagttggctgtttcccttcttttgtacttgtcggttgcctcaggccatctggatgtatacatgcaggcttgggttcagaggcctgacattcctgtcttcttatattaataagaaaaataaaacaaaatagtgttgaagtgttggggtggcgaaaaaattgtttttggggtggtatggagagataatgggccatgtttctcagggctgcttcgagcaggattaagggctgtgtggaccttaaagaaaattttataataggttacatggaataggagtttaggctgtggggagatcttggggcagaggatggtactatggggttgttaaaagtagcatttgtcatatagaatgattagtgatggtctgaatgtggttttgtgtgaattgagaaaccaaacggaagacacaaggcccgaataagaggagaaaaagaggtaccagaggactaagaattgggaggacccaggatgtccaattagagagtgcccaagggggttcagcataattacttgcttgttggcgagtttttgggctatatccttgagtttttttttatattgtcatatactaggccagattgatttaggtaaaagcaacactcttcatttaaaaatatagagagtcctcctttttcagcagtgagtaagtcaaggcctcggcggttttagaggacaactgcagctaaagagtcaaccttggcctgaaggactcatagagtttgtgatatgtctgtgatgctagcagagaagtcattagagaggctctggaaggtcgtgacagaggctgaaatgcctgctattccagttctgagcgcaatagcggaggcagaaagtcctaaaccgacaagtaagggaattagtggaataacctttttttttgtcatgtcggtgtcatgagaggaacaggaagcttttcagtcccattcgcaaattgaattttgggagtaaggtaaactagtgtgcatgtgcctgtccaattagcaggtagacacatgtaggcagaggatccacagaggaagaagagaccttgtgcaaggcaaaactggaaatgcaaagtaaaaagatgagaaggaatactaaaagaggtgtcttgcactcagactcctagggatccagctagggcggcagccatcagaggttgtaatggggactgatggggtaactgcatagagggggaggttcgattttcatggtgtatgagaaaacgttgagtgtctacgagcaacctttcactgttatttacagggctgggtataagcaaacaaaaagagggcctgggaggagagtctgacgagcaaggggaaggtagtcaaggatggagtgaaatacagggtaagtgtcttcctaggaaataataactgctaatgtttttaagtttgccagtattgatagagggcttttctgtaatatggagctgggaggccccaattgtttcagtgatatgtgtagttgggctttggagatgaagagtgaaggaacacggagaaggtgaaaggttacctaggggaattccagtgggtctttgccaagagatacataaaggagtggccacaggaatagtagtttgtgttgtgaggggtccaaatatggggggagtagaattaatataaggagaaagattttttaagtaagtgcggagaagggcggcagcttgctgatgtgaaatgtctggggaggtcttgctggacctgtctagaaagtaaagaatttctttaggagggttaaggtgagggctgttaaaggaagttcggaggtgtagggagacaggagatgttgcttagtctgtatgtaaggcggggacagctgtgtaggcacaggaagaaagggaaatgcaaagccagcaattgttctctaaggagggatcagagacggctaggagagagtgaatgagactgatagtgtggtggagatagctggggagaggtagagggtggcataagaatgggaatgagaataagagtgagtataaaagtaaagaatagaacttcatcagggtggaagtattggagggtgccctgccagcaaagatcatctatccactctaagagggagttaagagtggcagtttggggatagcaccaggagatatccactgtgatggtttggaggaacagtgtaaactggcagtgtaaacaagagcagggcatttatgagtagttgagaacggtgaataagagtatgactagacagaagatagtagggatgacaagttttttggggtgcagtccaagtagtgggggtgactgcataaagccctgttgcaaaaagtagggtaaggatgaacagacctagtagaatgaagggacgtattaggctcatgagggttattactgttcttcagaaatacaagtgagtttaagggaagtaggggagagtacttgcgacttccaggaggaagaggagagattaggctggctgtttgatggacacagctttattctggaatggtgaacccaatggggaggatcctgcaggcggacagcagttggggtgctagagatgactaagtagggtccagtccattgaggttgtagagtttgaggggtcagattcttaacaagaacgggttgtccagctagggtgtcttcatatggctgggaatctggagtaggcaagagaagattagcagcctggggaatttcctgtctagcctgctggaggcctggaagatagttgcctagagggccggtgtctgggacaaggttggggccgagcaagaaagtgtgtccatgtaaaagttcaaatggactgtaccctgtagcatctcgaggacaggctctaattctgagaagggcaagaggtaaaagtactgtccagtcctttttaagttggagactgagcttggtgaggtatgtctttaaaagaccattagtccgttctacctttcctgaagattgagggcggtaaggggtatgaagtttgacttatttcagcctacagagagtaggatgagaattggtgagtgtgtatcagacacattttggctcaggatggaaaagaactgtcacagtaaagtaagtttccttgggaaattacaagtttactggtggagttcaggcctgagctgggtgtctgaaaatacctgttagagtgatttctaaggttacaagggcagagcttggcttgaaactaggtttcccactgataccacatattaggtattatacaaactgtcttttgcaatgagacacggccctatgatgcaggctgagctctctgacagttacttcctgtctttgtgggcgattgtgattttatctcctttgtgacctggactttacctcctaccctttgctcttgccagccctcccacttcctttactggtgacaaggtttaagtgcatttactgatgatggtcacaaggtggcagcactgcctcactggtgtttcctaagacctctgcttggacgtgggccagtctaaggtgctgttaggattaagggcatgaatgaggctaaaggtaaactttattttcctttttttatcctgtgaagtaacagaatttgaggtgagtgtgaagtaattgcatttgagaactggaagtgccatgtgtggtggctcatgcctgtaatcccaacactttgggaggctgaagcaggaggatggtttgagcccaggagttccagaccagcctgggcaacatggtgagacctcatctctacaaaaaataaaaaaattagccgggcacggtgacacatgcctgtggtcccagctacttgagagcctgaggcaggaggattcccttgaacccaggaggtccaggctgcattaagctatgatcctgtcactgcgttccatccagcctgggtgacagaatgagactctgtctcaaaaaactccaaaaatgaatacaaaattaaaaagtctggtagaaatgcttcacaaactttaatgtgctcacagatcacccaaagatcttgtttaaatgcagattctgattcttctggtggggcctgagagtctgcatttcttttttttatgattggcattttcacaagattctgcatttctaaggagcatttggacgatgtcattgctgctggttggtggagcacactttgagtagcaaggcttgagtatcatttagagattaattctcactgcatctgatttatggatggggagagactgaggtgtggagatggaatagagcttgccctccatagccatgccctcaccgcatgactttttgcgtttaaacccagggcttcagcctctttgtccagtccttgcctcatgcatcacatggccccttcactgttgttggtggcatctctttagcttaggaactcagaaccccatttttatcacccactctgggcttggctcaacatgtcactttgactggttttccccttactcaaaaccttcactgactcttctgtaattcacaagatcaagttcgaatgtctgtgtccagtgttcatgcctctataacatatgtatgatccccctttagcaagcttacctaacttccctggtttttgtttttgtttttgtttttgagacagagtcttgctctgttgcccaggctggagtgcagtggcaccatctcggctcactgcaagctccgcctctcggattcacgccattctcctgcctcagcctccctagtagctgggactacaggtgcctgccaccatgcctggctaattttttgtatttttagtagagacggggtttcaccgtgttagcgagggtggtgatggtctcgatctcctgatctcatgatctgtctgcctcagcctcaaaagtgctgggattacaggcgtgagcccaccgcgcctggccacttccctgtttttaaaccatctctttctgctctagctctccctgttccttcctgttccctacacatactctgttctggtctctctcagtggtagtggtggtggtatgggctctggtgttagactcactgagtttctaatccaacatccaccaacaaccttggcaagttacttcacctttttgaggatcagcatcctcctgtgaaataaccccacatggtggttgagaggagtaaataaaaaatcatctgtacctcataaatatatatacctactatgtacccccaaatgtaaaaattaaaaaaaaagtaaaacgacatctgcaaacccgctctcattcctgagaccctcttcaaagctagcatctacagcagtgcctgccacctggtttccttggcgtgtgtttctccttgtctctgctttcctaaggttgaacccttcaggacctcacctgaatcccgtctgttccatgaaacctttcccagccattcctgacccagttgatccctcgcttctataaattattttacctatgtatgggcatttaattacatgccagccctctcagtgagaccccatagggaggctggaagggtattggatgtgtgcgaattgaaggttaattgaatgaatacttttcttactacccactgagtgttagagctgccgtctctttttttcagctagtcccagcggcagttcctcctgcaccagctgcaccagaccctggcaggcatgtgaataccttagggattgctcttgtcagggtccttcctgcctctgggttttggttaaattggtgtttccttttgcacgatatcagtggtccctctaagggagagattgatgatatctctttatggaaatgccaagataataactgaggaagttgaactcaatatcttattgcttaaacagcctggttacaggagatgtgtacacactttcttgtttcgttaaaattacaacagtctttactctcttacttcagaagagactggggacaaaagaccaagtgggagtgtgggcaacatagggagaccccatctctacaaaaaaaaaattagctgggtgtggtggtgtgtgcctgtagtcccagctactttggaggttgaggtgtgaggatcgtttgaacccaggagctcaaagctgcagtgaactatgatcacgctgttgcactctggcctgggtgatagaccaagaaaaaaaaaaaaaaacaagtggggaggacagggtggtttaggggagttaatgtacctctaacctggattctctgaattgttctttcaatcatgtctggaagtgtacatctttgtatgtgtggtcatatatttatatcacatcactcataattccctgcctgtcagtggcaattaggagatcatgtcagtcaggcttaggatattaaaattatgtagtatgtgctttcactggagcaaaggtttctctgaagtctggagagaaaatggaccagtagggctggaccctttacttggggtcctgccttctctttttattggacagcagcctactcagccatcactttcccaatcaggggcttttttttttttttttttgagatggagtctcgctctgtcgcccaggctggagtgcaatggcacgatctcggctcactgcaagctccacctcccgggttcatgccattcttctgcctcagcctcctgagtagttgggactacaggcgcccgccaccatgcctggctaattttttgtatttttagtagagacggggtttcacggtgttagccaggatggtcttgatctcctgagctcatgatccacccacctcagcctcccaaagtgctgggattacaggcatgaaccaccgcgcccggccaatcaggggctttttaaccttcccattttcctataaaggatccatgccaatgttcagatatatttattgtgcctggaactggatgttcttttaaaaagtgaatcccagggatggcttcctagcagatttccaggattctaatcttcactgtctaaactgtgggtttccaaccttgaatactgattagagtcgcttgtagggcatttaaaacctaccaatgcttgtgccttcccccaagagagtgtgatttgattgatgcatgatgtggcccacgcactggttgtttatgaatgcttccaaggaaaatggtcattttacagtgggggaactgtagcccagtgctcaaagttaacatctccagtaatcagagatactgacatcttagggcatcctaatatgatggatggagaaggcgcagcatcacctctgtagtattcttgcccaatgtatataactttagtttcatcatgagaaacaactaggaaagcccaaaccgagggtcattatacaaaataactcaccaatactcttcgaaaatgttaaggtcatgaaggcaagagaaattctgaggaactgtcccagattaaaggaaactgggaggacagagcaatgagatgcaatgtctgatcctagattggatcctggtccagaaaaagaacattagtgggaagataaaggggatttgaataaggtctacagattcattcattgtacagtatcagtgatcatttattgattttgatgattatactgtggttatctaaaatgttaatatttggggaggctgagtgaaaagtatatgaagaccctgactatttgtagaagttttttgaaagtctgaaattatttcagatgaaactaaagaaaggaaaagaaagcttccaggtaattctactgagttgccaaagctgaaaaccacttctctaagttatcttgcttaataatactgtcaagagtaatcttcctggaaataccatattgttatgtttgtgaccttttcaaagctttccagtgattgctgtcatctaggatgaagttcctgctccttaggctaccatttaaagcccccatagcatggcctcaatctactccgttgatctacgtggaaggacttaacctacattttactttctcatgcctgagcttattctaattcttttactccttcctatataatacccttgccttcctgttcagcctcctgagctgttctttgtgctatggcccatttcagaccctgtctcttcattgaagcctgtatagttattcctgttagaagcaatcatccttcctttctttgaattctggtaggtaccgtgatgtggagtgaaccacgagctttagattcagaaatatgtgagtttgaatcctttgacagttccacctttaaccagttctgagataagggacaagtttatcaacatcttggaatagaggggtaatagagtacctgcatcaaagggtcattgtgaccattagatcagatgcaaacataaaggtcctcagcacagcatatagcagattctttcctcagcactttaatagctcagtggttcccagaaagtttgtgggtggtgtgaaggctcttatcaaaatttcctaaagagccttttaaaaatatttgcacctggtcatcactaagatgacagatgctctttaatggaactgaatgcttgggactttaagaaatgcaactgagatttttttttttcccccttggaacacaactgagtaaataagtgacctaagggcagaggaatgtaacccaaaagagggagaaggaggaactgggtttttaagtaggaaaaagctgtgatgccttccacacccactctgttgctgtcagtgagacagcagtgaggaagtaccactccctagtacaactccttaaaccatgagtcctgaacagcccttcactaatccattccctgtccagatgatgtgtacctggatgagtcagatccccatgagtcaatcattcttctccgtcttcagctcctccatcctcaccactcagtgctatgtgctatggtctggccccacttcccaggccattagtattggcctaagaaagcaagactgggaggggcaactgagaaggaagtcagaggccactaggcatggaaagaggcaggtggggctgtcattgctcaaaggccacacactctgggtgtgttttatgactgttcctggatttgaaatcttttcccctttgtgatcattccagagactcaccctcctcctgcttccttctcatcacactatctgttcctagtgcatcccttttacggccagagaatggctgtacaaatagttaacaattcagtaaaagttacagctgagcacggtggctcacacctgtaattccatcacttgggaggatgaggagggcggatcacgaggtcaggagttgaagaccagcctgaccaacatggtgaaaccccatctctactaaaaatacaaaaattagctgggtgtggtggcacgcacctgtaagcccagctactcaggaggctgaggcaggagaattgcttgaacctgggaggcggaggttgcagtgagccaagactgtgccactgcactccagcttgggcgacagagcgagactccatctcaaaaaaaaaaaaaaattactttttgggagaactgggaacctggccttcctttttgccaaaagagattgaggtccataaaagccagcttttattccgggctgtgcagttgtgagtgtggtgttagggaacaggtacataagtgaagggtaagacagaaaacaaaatgctggctgtttgtcaaatcctgagagtagaggggacaaaaatcattctgaaaggtggatgtcattcaggacaccttggaaatcttagggtgtcctcgcccagatggggaggaggatgaggttaaattatggagttgagtgacacttggtacattactaaacttctctgcttcagtttttttttttttttttttttttttgagacggagtctcactgtgtcgcccaggctggagtgcagtggcatgatcttggctcactgcgcgctccgcctcccaggttcatgccattctcctgcctcagcctccggagtagctgggactacaggcgcccgccaccactcccggctaatttttttttgtatttttagtagagatggggtttcaccgtgttggccagcatggttttgatctccttacctcgtgatccgcctgcctcggcctcccaaagtgctgggattacaggcgtgagccaccatgcctggcccctgcctctgtttttttaatctgtaaaaatggggatggtgacactcaggattctttgagaggactggagctacatggaaaccccttgggatagtgcctggcggatagtgagtgctgcatcagtgtgagctattataattatgggaatagacaaaggtgtcacccggggcatccagagtgaggaggtattttccagtcagagtcctgggaggccagctggagatgaagctggtgaagggggaggcttaacctccaggagtggaaggattgggaaggagtaactcatgcataacattctgtgaaaatacctttacccaacagcaggaatacgcacagtgggtgtggcttctgtcacaattattgtccctggggtctaggaatgtgaaacccaagcctagaaacaggcttcaggggtgccttgcaaattagcattcatcttgccaaaggaaaatgttcatcttgttaaaagaaagcatttacgtgctaaaagaatcccttcttgtggcccaggtcattatttttgtcttggtactatccttttttttttttttttttttttttttttgagaaggagtcttgctcttttgcccaggctggagtgcagtggtggatctcagctcactgcaagttccacctcccgggttgacaccattctcctgcctcagcctcccaagtagctgggactacaggcgcccgccaccatgcctggctaattttttttgtacttttagtagagacggggtttcactgtgttagccaggatggtctcgatctcctgacctcgtgatctgcccacctcggcctcccaaagtgctgggattacaggcatgagccaccgcgcccggcctgtactatccttatttacaagatgtaaagagaaagactgggctgggctcagtggatcacgcctgtaatcccagcagtttgggaggccaagcgggggcggattgcctgaggtcaggagttcgagaccagcctggccaatatggcgaaactccatctctactaaaaaatacaaaaattagctgggtgtggtggtgtgtgcctgtaattccagctactcaggaggctgaggcaggaaaatcacttgaacccaggaggcggaggttgcagtgagccgagatcgtgccattgcactgcagcctgggtgacaagaacgaaactctgtctcaaaaaagagactgaagaagagtgaaataaggatatatatgcattagcagggcagaattgggactggtatgtgtacgttaagaggaagcatgtaaaaattgtatgtgaacataaaaaggacttcttgttttaaacagacctctccatataaataatgtggactgtcttgagtagatagcagactccatcacaagaacattccagcagaatcacaagagaatggatagtgtggccgctttctaaatggtagtttagagtgagcaaatcactgaaaagaaaggagaccaagaagatgggtgagggtgagagagatgggatggtgaaaggaaaagactgaaataaatgtttaccgagggctcaccaggtaccaagctgtgtgtctaatgccttacacatgtttttttttttttttttttttttaagatggagtcttgctctgttgcccaggctggagtgcagtgacgtgatcttggctcactgcaacctccacctccctgattcaagggattctcctgcctcagcctcctgagtagctgggattacaggcgtgcaccaccacacccaactaatttttgtgtttttagtagagacggggtttcaccatgttggtcaggctgatctcgaactcctgagctcgtgatccacctgccttggactcccaaagtgctgggattacaggcgtgaaccactgcgcctgaacaatgccttacacatcttaatttactcttttattgtcatcctctgatggagtaagagtcacctttgtgctgcaaatgagaagaagctgagggaggcgaggtgagtggtcagcatcatccagccagttcatagcagagctagtgtgtttcacctcaaagtttgtgctcttgcctatgattcagacagaaaagtgagacacagcaggaaggcaaggcaaatttttgttgtgggtgaagtttataaaaggtacctgtattaggcagaataatggcctcctgaaaatatccacatcctaatccctgggacctgtgcattttactttatttggcagaaagactttgcagataagatgaagttaagaatcttgagatgggggaattatcctggattatctgagtgggcacattataatcagaaggatccttataggtgaaagagggaggcaggagagtcagggtgaaaatgatgtagcatgaggaagactccactggccactgctggctttgaagatggaagggggccataagcaaaggaatataggtggcatcgagaagctgggtcgggcaaagaagaggatccattccttaaacctccagaaggaaacctccagaaggaacaccgccaatgccttgattttagcccagagaaatctattttggacttttgacctccagaactataagaactgggaaaaatgtatgtagtttttacattccaggaggttacagtctgctacatagtgaaaagggactggaaaaaataggccaaaatattaaacaacgattaggtctagattatgggtggaaaatagaatacaagtgatagctattttttctttcatactttatgtcttaattttcaaaggtaagaaattaaaggtaattactgtcaggcctctgagcccaagctaagtcatcatatctccagtgatctgcatgtatacatccagctggcccgaagcaactgaagaaccacaaaagtaaaaagagccagttcctgccttaactgatggcattctaccattgtgatttgtttctgccccactctaactgatcaattgaccttgtgacattctttttcttggacagtgagtctcatgatctctccaccgtgcactttgtgacctccaccactgcccacaagagaaaaccacctttaactgtaattttccactacctacccaaatcctgtaaaactgtccccccaattctccctttgctgactctcttttcagactcagcccacttgcacccaagtgcctgtatagtagactgtcttcacatggacgcgagtaacaattacattgcgatgttataaatagaagtatttcaatgtacctgttaaatcctctggacgatcactgagaaggcatatctttgagtgtaaggatgaatttgccaaggacaggagtgacgttataggcacagttttttaaaggcaggaagagagggccttatccttcaacctaaatggtccatcatttccatggatcaaactcaaaggaatgactagtcatcaaggaatgtgttcagtgacatcttatggggtaaactgagacattccaggagcctggaatcaatgtgaagtagtttcagacttggtggcaggggagaatgtgctcctaaaatctgttgtttagggctcagccttttctgcttttttcttcctattatttcttaacaatgctgaggtgggcagggccccagtcccggaacaggtcacctgtacttaataggaaggtttgtttcctttgttgaaaggggtggatatatagccctgagtttgttttttttttgtttttctttactagcaattagggaaacatagagtggctgctttctctactaacagcctcataatggagccatctaaatctcttactgattcctctaacctccagggagccacacctttacccagtcctcctagatcctgggggaatcagaggaccttgtgtaagcactatgtgaggaaacaagaaaacctaggggtaagaactcttgtaattgcctcttttttttttctttcttttaaaatattttaaacttttattttaggttcagggctccatgtacaggttttttgtttttgttttttgagacagagtctcgctctgtcgcccaggctggagtgtagtggcgcgatctctgctcactgcaacctccatctcctgagttcaagcagttctcctgcctcagcctcctgagtagctgggattacaggcgccagccaccacttccagctaatttttatatttttattagagacggggtttcaccacgttggccaggctggtctggaactcctgacctcaggcaatccgcagcctcccaaaatgctggaattacaggcgtgagttaccgtgcctggcctgcaggtttgttatacaggtaaacttgtgactcaggggtttcgtatacagactattttgtcactcgggtacttagtacccaacagtttttttttttttttttctgatcctctccctcctcccaccctccaccctcaagtaggccccagtgtctgttgttcccctctttctgtccatgtgttctcatttagcttccacttataagtgagaagacacagtatttggttttctgttcctgtattagtttgctaatctattttattaaagtatgtttccctttcacccctcctccctccccaccctaatattttagggctaagccctcatcactggacacaaagaaactggtttcttagatgctgctatgctttggttccacccaccaagacaatgggcctatttttttctataatcaaaggccctgtgtttggcccgtacagttctacgttaaactggtgccaaagctcacgccttcctgttccgttccttccaggtcatctcagaatctgcaggcttgtggggcagggtagggagtcctgagtggtgaccacagaaaggggaaagctgtgggaatccaagacagttgttcttgagagagtcttctaggcctgttggcagaagaagcagaattgtgggccaggacctgggtcctggtgttggtgactgagctctgactttgaatgagtagatttgcctatctaggccttagctgtgcctgctgcaaaatgagatttgagatgaactcaagcccttacagcttgactgctctagccatgcattttcttttctcttcctcattgaaatctatatcattccttcagggcccaaggacccatgctcagaagaaatcaatttggctaatgtccttatgagaggggaccaaccctcaggctttatgtgctctttggccttttatgcaagagtggtgagggtggatatttttgttctggtcttcttttggtgctctttgatagcaggaagggcagagtcctgacagactgtgaaagtcttgaccaccagcttaaggagtctggactcttgtgagtgtggaactaccagaggcttaaagtgggaagtgacctgtgtctcaggacacatactctaggagaagtgtggctgtgcagagtccacatgagagactcagatctgaagtgagaaatcagagggcatgaagaacaggggcataggcgtgagccatttgaggaagagttggaggtctttgtgagtgaccagaggggaggagatgggaaggaggggcctgaagatggctccgagctgtgtctagtttgggattttgggtggaccagatgtcattagccccaagataagggtggggctaggttgattaggggctgaaatgctaaacctagttttgaatgttagataagatgcctatcggccatccaggtggaactactgtgtggggagtgggaagaatacagctggcgctggagccagggagtggtagagggtgaagaggaaagagggagtgagctgggggggtctctgcctctgtagtaacttcacacctgctctcctgcgtcgagctcatggctgtgttctactctttccctctctgttctctgatcagagcaatttttcagggttttggctggatagatattattagcccaggggtcacatatttactaccaataggtcttttggaaaatggggactgtgaatcaatgaatggagaggtgaaaagaggagagtgaaggaaggacttttggagaaagataatagggaagaggaggcaggtgaaacacatgctataaaatgtgttagcattcattataaactataaaaagcacaatgcaaatgtacagttctgctgagaacactgtgaccatgggttggaagggggagaggtgagactaggagggtaaaggggaagaagtagcttagaaggatgaagccaaaagccaggctactagatctagaagtctccttggaaggctctctactgcttaaaaattacttggcctatccaatctctttggtgtaatgagttttttttttttttttttttttttttggagacagagttttgctcttgttgcccaggctggagtgcaatggcacaatcttgactcactgcaacctccacctatggggttcaagtgattcttctgcctcagcctctggaatagacgggattacaggcatgcgccaccacacccggctaattttgtatttttagtagagagggggttttgccatgttggccaggctggtcttgaactcccgacctcaggtgatccgcccgccttggcctcccaaagtgctgggattataggcatgagccactgtgcctggcctgggtgtaatgagtaatgggtcttatatgtttatatgacgatattaaatgctaatagccaacaaatattgtatgcttacaattagtacatctaacacagctagtgtaactaatattgtgtactaatagtacgatgagtggccaacaaatattgtgtgctcagtatataccaggcagtgtgctaaacactttaactagattacctcagttgatcctcacaacagcacatgcggcgggtacttttattggccccattttacagatgaggggagtgaggtatagtcatttgcccagggccttgcagcttgtatgctggagccagaatatgaagccaggccgcctgggggactatatagcatgtggtcttaatcactcagcagttcagggtagttcagtacattctgtacttttctgtttttttgtttttgttttttttgagatggagtcttgctctgtcacccaggctggagtgcagtggtgcaatctcggctcactgcagcctctgcctcccaggttcaagtgattctcctgcctcagcctcccgagtagctgggactacaggcacgcaccaccacgcccggctaatttttgtatttttagtagagacagggtttcactgtgttggccagggtggtcttgaactcctgacctcgtggtctgcccacctcagcctcccaaagtgctgggattacagacgtgagccaccgtgcctgaccttttctgtgtttttttttgtttgtttgttttcttttgtttccttttacctctgacgaagacatagataaaatgcagctcaggtacagaaagtgtcaactttcaggttgattcccagattgagagcaggaatgctgaggaaagcaacagggtaggacttctcatagagtggtccttggatcatctgtattgggatcttcgaggatgtttattaaaaactgagatctaggctgggcgtggtggctcacacctgtaatcccagcactttgggaggccgaggtgggcagatcacaaggtcaggagattgagaccatcctggctaacacggtgaaaacccgtctttactaaaaatacaaaaatcagccgggcatggcggcaggcgcctgtagtcctggctgatggggtggctgaggcaggagaatggcgtgaacccaggaggcggagcctgcagtgagccgagattgcaccactgcactccagcctgggcaacagagcgagactccatctcaaaaacaaacaaccgagatctaggccaggcgcgatggctcgtgtctgtaatcccagcactttgggaggccgaggcgggggatctcttgaggtcaggagttcaagacgagcctggccaacatggtgaaaccctgtctctactaaaaatataaaaattagctgagcatgggggtgtgcacctgtactctcagctactcaggaagatgaggtgggagaattgcttgaacccaggaggcagaggttgcagtgagccgagatcgcgccactgcactccagcctgggcaacagagtgagacggtctcaaaacaaaaacaacaacaaacaaaacaaaaaataccctgagatctatagttatcacttgggccaactgaaagaagaatttctcaaacattgatgtttgagacctactgatttaaggctgaatgtctggttctggaaggaaatggaatcttggcttcttcagtcaccacagtttgggtcttgttcctctgtaaaattaacaatgtaggccggcacggtggttcacgcctgtaatcccagcactttgggagtctgaggcgggtggatcacctgaggtcaggagtttgagaccagcctggccaacatggtggaaccccgtctctactaaaaatacaaaaattagccaggctttggtagcgcatgcctgtaatcccggctactagggaggctgaggcaggagaattgcttgaacctagtgggtagaggtagcagtgagccaagatcacgccactgcactccagcctgagcgacagagcgagactccatttcaaacaaacaaacaaacaaacaaaacccaaaacaataatgtggtccgtgctctctttctttctttgggctcttggaggggtggggtgggaggaccaagagtggataaaattgcacttgcctttataccagaggaggcactgtgaggcagcatctcttacatttacctttcatttatttttctcccccagatgggtttcacttctctctctgtcctgttggggaacttcccagctgaggacctccatgtggtttggtgctcggttgggcgatgagcattgggaggggagcagttgtagtgacttctctcgggcctgccatgctctgccatggaggtggagtgacatgaagtttagctgcttcacctcagtctgctcaagagtggggactgctgagagcagtgaatgggggacagtggaattgcagcctgggatgtgaaacggggatcctgttacctgcagctgtagtcttcacgtgtcctcatcttttgtgactcccctagggccctgagctgagcaagacagacaaacaggaggaagtattaatctttctgcttccatctcatccactagcaagtttggaaggccagtccagttatacccactgcctcgggtgaggacatcagagagttttatgcagctcagttttggggatgttcacacactctggcctcaggaagatccagaagtgagggaaaggctctgggctgggagtgaggaggccttgttctgtgtcagctaagctaccgacgttctttgttaccatgagaaagtcactcgctcactctggacgggagttttcttatctgtaagctgttggatttgagtgagatcatcttttgtgttctcaagttctgattctgtgattaacagtggtaggttgaggcaggtgtggcagagccccgaatgctgctttttctgtcacatgtgcctccctcccccaaaaggaacaagtagtgagttttatttgcatctcttcttgaatagctctgtgtttctaagggctgaagaggcccactgtgggtgtggtgaggagagtctggaggcaggagcttcctttggctctggggaaggaggcccagttggtagcttccctgccattgcacagacttcttatgttccagtaataacatgacttccctccctgttctgcctgcttctctaatattcagtttctagagtaggctatgattgttttgatagatttcccaactgtttcctgcctatgtgtctttgaagcaaatagcaggaaattcttttcatagccatcagggtctctgtttcatatttccccttttccatagaacctgacagatccagggcacagagagacacatgtgcatgttccagctcccagtattcatacagatatggtgaagggtaggtggagttagattcttacggtttggttagtattgtccggggagctcctgtaacacatgtgagattctgtgttctgtgataatgtcttgtatgtcactgctacttaagagtttaaggtgaagctttgtgagtgtattacatgtgtctggtgcatgcgtgtgggtcagaatgtggatcagtggctgctgatgtgctgatgctgagaggaagtgatttaggagctgggcttgctctctttatgtttctgctttttgtgcaatgtcctggtaacttgtcagaggctggataagatgttagaaattttcttaatccagtctgaaatctgccttgttttattcctgggtatgaatcatgtgaggggttgggaggtggaggatgaaattcccataccttctgaatagtccaaggtcagttctcagaaatcagatgttggttgtttagccatcacacccttagatttatgagttggacctagaggatttgatcgcttctgtgacagaggtatcatcctgttcccagaaaactggcgacacgttgacatgcaggaaattggtcagatttatggcttgtttctaaccaacatgtaggcgttctgccctttaaaaacaattaaatttcactgatgtttttcatgtatctaacaagggccagttgctgaattctcaaagataaataaaataagccgggcgtggtggctcacgcctgtaatcccagcactttgggaggccgaggcaggtggatcactaggtcaggagttcaagacaagcctggccaagatggtgaaaccccacttctactaaaaatacaaaaattagccggggtggtggcgggcacctgtaatcccagctacttgggaggctgaggcaggagaatcgcttgaacccaggaggcggaggttgcagtgagccgagatcgcgccactgcactccagcctgggcgacagagtgagactccatctcaaaaaaaaaaaaaaaaaaaaagataaataaaataggatctctttcctcaggaacaaacggtttgtctttttttgaacatggacttctggggctaattctcacagtacccaactgtctgtcttgcaagcctttgggagctctcagaaccagacaggctagctcagtcatgcagcagctgacacaggagagtggggtgtgagtccagccccttgccactttctgactctcccttttaggacacagtggccatgggaaggcaagacactgggctccttaagaaaggctgtggggggaatgtggtggaggtggcaactgcaattatccctcagcttgcccctcatctctccagatacaacagcatggcctcaagcacacccagaagtggagaatgagtgtatgttccctgggggaccagaaatggatttgttagttgttcttacaaactgtagtagtgagatggcagggcaatttgagccttgcggagtcatgagtcatccgtagggaactataattacttctctccattcagaccaggatgctaggcagtagttaaatggggcagggccaggcacggtggctcatggctttaatcccagcaatttgggaggctgaagtgggaggattgcttgaggccaagagtttgagactagcctggccaacttggtgaaaccttgtctctactaaaaatataaaaattaaggctgggcatggtggctcatgcctgtaatccctgtactttgggaggccgaggtgggtggatcacctgaggtcaggagtttgagaccagcctggccaacatggtgaaacccccatctctaccaaaaatacaaaaatttgctgggcgaggtggcacacgcctataatcccagctactcaggaggctgaggcaggagaattgcttgaacccgggaggaggaggttgcagggagctaaaatcttgccagtgtactccagcctgggtgacagagtgagactttgtctaaaaaaaaatatatatgtatatatatatatatttatacacacacacacacgcacacatgcacagatagatagacatagatatctatatatataggtatctatctatatataaaaattagctgggcatggtggtgcacacttgtaatcctagctactcgggaggctgaggcatgagaatcacttgaacccagcaggtggaggttgcagtgagctgagatcataccactgcactccagcctgggtaatagagtgagactccatctcaaaaaaagggagggaggggcatttgtggagaaagatgcacaagaaatgctcaggccaggcatggtggcacatgcctgtaatcccaatcctttgggaggccgaggtgggaggactccttgagcccaggaattcaagaccagtctgggcaacatagcgagaccttatctctaaaaaaaaaaaaaaaaaaaaatttaaaaatttagctgagtatggtgacacatgcctgtagtcccagctacttgagaggctgaggcaagatgatcactagagccttggtggtcgaggctgcagtgagtcatgattgccccacagcactccagcctgagtgacagagggcagagtctgtctcaaaataaaaaaataaaaaagacatactcagaccaactggtgccacatttttgtcggaggctcatacattaagctgctgtcccctccaccacacagaggcacaaaggcagtggcagctgggacttccttccctgttttctcccattcttctaattcttcatgatgcccttttgtgacttctttccccctttaatactgcttttgatatcatttcagcctgatgtcacttgtgcaaaatcactgggggtaggctgggtgaaaattttccaaaccacacattctttttttttttgggacagagtctcactctgttgcacaggctggagtaccatgtcacaatcacgactcactgcagccatgaccttttgggcttaagtgattttcctgcctcagcttccggagcagctggcgcatgcgaccacacttggctaattttttgtagagacagggtctcactttgttgcctacactggtctcaaactcctgggctcatgtgatcctcctgcatcagcctcccaaagtgctaggattatatatcagcttgagctgctgtactcagcccaaaccccacattctttttttatttttgttttttattttttgagacagggtcttgctgtatcacccaggctgaagtgcagtggtgtgaacatacctcactgcagtctcaacctcctgggctcaagcgatcctcccacctcagcctcctgggtagctgagaccacaggtgtgaggtgtgtgccaccacatgtggctaactttttaacttatttttgtagggacggggtcttgctatattgttcaggttagtctctagctcctgggctcaagtgatcctcctgcctcagcctcccatagtgctgggattataggcatgagccactgcgtctggcccaaaccccatgtttttttttttttttttgagacggattctctgtcgcctaggctgcagtgcgatggtgtgatcttggctcactgcaatctctgcctcttgggttcaagtgattctcctgcctcagcctccctagtagccaggattacaggtgcccaccaccgcacccagctaatttttgtttgtatttttagtagagacagggtttcaccatattggccaggatggtctcgaactcctgacctcagctgatccacccacttgggcctctcaaaatgctgggattataggtctgagccaccacgcctggccccaaaccccacattcttaatggcagctctgggccctacataatttcacttcttcagggtgaccctgggaacttaattctaacttgggtcctattgtagctctttaaccaccccaacagctctgtaagtatagttcagcttgagagaaagagacacagagagagaaacttcaagcactgggtgtttggtgccttgggagtcagacagactggacctggatttaaatccactttgttctctattatctgcgtgatcttggacaactgacttaagctctctagggctcaattgcgacatttgtaaaatgaagatgataccatgtaatagttataatagctactgtattgagcactttatatttattaatacagttaatccccatatatctctaggaattaggtactattgtagttgtcatttctcagataagaaaactgaggcatagagaggttaagcagcatgccaacagtaacacaattcttaagttgtggagctgggattctgaacatggaagcccaacctcagagcctgtgtccttaactactgcagtggactatagtccacagaatgttaacaaggattgaggtggggggaaaaaaacaaaaaagccccccaaaaacacaaagcatttaaagtaccaggtatagagcttggcaataagttattaaattacataactgatggcagtaaatggcagctgttgccgccagggtagaaaagcctgttttccaagctgtgtttccccatgggcacacggaggatgtggccctcagtcagggcaaggcaggagagagacgggtcttcccgctgtccagggtttgcaaggtgtcagggcttcttccactccgactctgttagacacagtttgttggcaaagtcttgtttctctaatcccaaagttgcctaacaggccccgaaaggaaaacacaggagcagggtggccataggaaagggctcccttccagtgagccagttgctcaagaatcacttttctcactgcttcagaggaatctggctttttgtatcctgctgtcttacccatttggtcagggctcctggataagctacctggggaacagagtggggcctctgcctaaattggcacaaggtgaagagtcaatgccaagaaacaaaggagaccctgcagggacctggggaaacccaaatctgggcttcaggggaagggagcatcaagcctgctctgattctttgtcatgtatactttggccctctgcctgggcttgtgaatgtcttggttagtcactgagcagttcgggtgcacctgtcccattcaagacaccaactgggttagaggcagcatggtttttggctaaatgtttttatggaagctgaggaacctgcatttcactatagctctgccactttttagttaagttgtgtgatcttgacagtttactcttttgtgagcctcacttttctcatttgagaaaattatgaagatcttttttgagacagagtctcattctgttaccaggctggagtgcagtggcttgatcacagctcactgtagcctcgtcttcctgggctcaagcaattttcccatctcagcctcccaagtagctgggactacagatgtgtgccaccatgcctggctaatttttaaatttcttgtggagatgaagtctctctatattgcccaggctcgtctgaaactgctgggctcaagcagtcctcccacctcagccacctaaagttctggaattataggcgtgagccaccgtgcctggctgaattatgaggatcaaatgacatcatgtacacaaaggccttagaacagcaacttacacattataggtgctcagtaaatgctcatagtcacaggttaggtgcagttgggagctgtggagaaatataaagtacaatctcttgcctttaaggaggttgcagtctagatggggtgagaggtaataagatagaagatcatgtaaatcacaatgttgggaatgcatgtaaaataatactggctggttgtgcgcagtggtattattgtagccaatgaggtttatccgaggtgcaattattgtgaatgggaaactttcgcaataacatcagccaacaagtgtcatggaccatgaaggctttgggagttcagagctatgagagctgccccatgggctaagccagggaaggctttctgaacaagtgagtgttgcaaacctgcaaaggttggagaggaaggtggagggacactccagaaaaagaacagaatgaggccaagtagcataagttcagaggataggaagaaaacagattggaaccaagggcttgtaggagacatgagagggaaatgagattgaataggtgggttgaggtcaggttgtaaagagctttgaatgccgtgctaaggagtttggaatttatctgaaggtttttgaggaggggaatgatgttcatattgtgaccttgatttggccatgtattcttttaatttctctggaccttagatcccttatctatacagtaagaagtttggatcatgtgattgtagaggagtttctctagctagagagtttatgattctatgatacaggaagactattttatttttgtctttatttatttatttatttttgagatggcgtcttgctctgttgcccaggctggagtgcagtggcacgatctcggggctcactgcaagctccgcctcccttgttcacgccattctcctgcctcagcctcctgagtagctgggactacaggtgcccgccaccatgcctggctaattttttttttttgtatttttagtagagacagggtttcaccgtgttagccaggatggtctcaatctcctgacctcgtgatccgcccccctcagcctcctaaagtgctgggattacaggcgtaagccaccgtgcccagccgaggacttcaatatttaaaggagaaagaacaggcaggaggaggaggaggaaagaaaaagaaaggggagggtaggcagtgaggcaaacagttacattcttgggaggctttgattagcactcagtgaattcgcattttacatgtgaaaagaaaggaatggaggggaagtcaattatgcatttatctagtgctcaatagatctacattttacataagataatgtaagactgtgaaattacagctatctgtttaggaacaaaaagaaggcagtttctgcatgactcagttcccaagcttaacttttccctttggcatagtgaatttgggatcccaagattttattttcctttcacaaactcaatacattgattaagtttaagacttcaccatgtgcctcacacatggaatccagtaaatgtttggtgctgtttattcactcattgaattccttaataagcatgtagtttcctgaatgcctgctagatactaagcactatattaggtactaagtatattaatggaaataaaaacatggtggcccttaaggagctcatagtcttttaaaggagacaagtcaaacagttacagaacagaatgacaagcatgggtcaggcacggtggctcatgcctgtaatcccagcactttgggaggctgaggcagttggatcacctgaggtcaggagtttgagactagcttggccaacatggagaaaccccatctctactaaaaatacaaaaattagccaggcatgatgatgggtgcctgtagtcccagctacttgggaggctgaggcaggagaattgcttgaactcgggaggcggaagttgcagtgagctgagatcgtgccattgtactccagcctgggcgacaagagcgagactctgtcgcaaaaaaaaaaaaaaaaaaaaaaaagaataacaagcgttatgattaaaggacaaatcaagtgttacaggagcataggggagggcttactaactcatcctgggatgagaatgctgagaacagagaaaccttttcttttcttctcttttctttctatttttaagagctaagttctgaaagaggagtagaaattgagaggagggccgtctagggagaaggaacaatacacgcaaagtctgtgatgtgagggagtgcaaagtcagtgatgtgttccgggaactgcaagtagctgagcctgttgtcacagagagtacacaggcacagtgattagaagtaatcagggaccagattacgaagagcctggtatgcttggtgaagaagtttagattttatcctcaaggtgatggagaactatacctagattttaggcagggtattgatgtaaccacccaatgggttcttcctgcctgctgtacaaataatgaccacagcattgcagtaaagaaagagtttatgcggtgggacgaaagagtttaattgacacaaggctggccacaccacatgggagatggagttgttattcaaatcaacctcatcttcagctcataggttagaggtttttatttttttcctattttattttattttattattattatactttaagttttagggtacatgtgcacaatgtgcaggtttgttacgtatgtatacgtgtgccatgttggtgtgctgcacccattaactcgtcatttagcattaggtatatctccaaatgctatccctcccccctccccccaggttagaggtttttcaaaggcagtttgggggaaggggttggagtgcttgcggctgattggtttgggtggagatgaaatcataggatcttgaagctgctctctttagcgagttgcttctggctagggccacaggagtggagttggcaggtccaggtggagctctgggtgtcagacatgcaaaaaacctgaaaagatatctcaaaaggccaatctacaacagtgatgttatgtgcaggacatatctggtgaccagtctacagcttagcagaattcaggttcctctcctccctctatcctgatggcctttcattagctttacaaaggtggttgagttttggggaaggtttcttatcatttaaactataaaccaaatgtctcccaaagttagtttagcctaagcataggaatgattaagggaaaggcaagatgggggagcatgggttagataagatctcttactgccatatttttttcactgttataatttttccaaaggcagtatcattgacattagcagacttgtgttttagggtgatctctttgactgtcaaagtggaggacagattgaatctatgagttaggggaagatgaagcccagaagcaggataagttgcgttagctgtgattgctgctttcttctctgggatgcccctttccatctttacagatcttgcctgtagtacttgccatagcaccaggcaaatagaaggcattttacatcatgtgttggttactccactgctgtggcttgtgctaacagtgactggggcactgatttgaaagtaaagtgagcaccctttttcctgtggtcacaaatcaggcaaaattgctttcttggttagaactgacgtggaagatacacacacacacacacacacacacacacacacaaatacacacacacatacaaacacacacatatattttttgaggcagtcactcaatcgcccaggttggagtgcagtggcatgatcttggctcactgcagtctccgcctcctgggttcaagcaagtcttctgccttagcctcctgagtagctgggattacaggcgtgcgccaccacgcccagctaatttttgtattttcatttgagatgaggtttcaccatgttggtcaggctggtcttgaactcctgacctcaaatgatccccctacctcagcctcccaaagtgctgagattacaggcgtgagccatcgtgcccagccagaagatatgtttggctcttctcaagatgtctccataggcattttccattttgtgaagagtctttgttccaaagttgacagtgggttcctttagggcaggaaacatatttttattcatttttgtagtccctggacttatcacaatacgtgatacatactaggcaatgatagatatttgtttcatgaatttgaaattcatgttttgtatttgaaatatgtttcatgaaatatgctgtaaatgttgattaggtgctcggattccccctcaaaagccttttaaatctagagcctaatggggtactgggcatatctaaggcctgagaaggagggaaactctaggaaatggcaggaattagcagaatggaagtaagttacttcccagaagtatttagcagttgaactgagacagttccagaaagattctgggccaaaggtttttagaaagacctactggggagattgggaagttctgaattccttttgctacctactgttatacaaatcgcttttgttcttcctcatatactttaaaatacatttggctggcacagtggctgatgcctgtaatcccaacactttggaaggccaaggtaggaagattgcttgaggccaggagtccaagagcagcctgggcaacacagcaagatctccattaaaaaattagccaggtgtggtggcatgcacctgttgtcccagctacttgggaggctgaggtgagaggatcacttgagcccagcaggtcaaggctgagtgagccatgattataccagggcactccagcctgggtgacagagtgagaccttgtttctggaaaaaaaaaaaaaaagaataaaattggcagggtgcggtggcccacacctataatcccagcatgttgggaggctaaagtgggaggatcacttgagcccaggagttctagagcaacctgagcaatgtagagagaccttgtcttttttttttttttttttcttttgagacagagtctcattctgtcactaggctggagtgcagttgtgcgatctcggctcactgcaacctccgcctcccgggttcaagcgattcttttgcctcagcctccccagtagctggaactacaggcatgcaccaccacacccagctaatttttgtatttttagtagagacagggtttcaccatgttggccaggatggtctcgatctcttgacctcgtgatctgcctgcctcggtctcccaaagtgttaggattacaggcgtgagccaccacgcctggctgagaccttgtctttacaaaaaataaacaaaattagctgggcatggtggtgcacacctatagttccagctacttgagaggctgaggtgagaagatcacttgtgagcccaggaggtcaaggcctcagtgagccaagatggtatcactgcactccagcctgggcaacagagtgagaccccatctaaataaaaataaataaataaataaataaataaataaataaataaataacagttaaactacatgacttgccatggtttcctgattctttgtctttttatgtttcctttcttcgttaggaatgttttttcctttatgccattgtcatcattcttcagtgccctgctgaaatgcttttcatgaaaccttatggaaaaaataatctctccctaccgaagtcatctcaatttttagacccccttgtggtacttaatgctctctacctagaattatatatgggttatcattcttacactagaaggaaggaatcatatgtaatttagctatgagtattccagagtgtctagcacaggtctttgtaaatgttgaatggacaatgtggctgagctgtattactaacttagtgttatgcttacttttacttgtcaacctagctggaccatgacgtgcccagggatttggtcagacattattctgggtgttttttttttttttcccccaagatggaaccttgctctgtcgcccaggctggagtgcaacggcgtgatctcggctcactgcaacctccacctcccaagttcaagcaattctcctgcctcagtctcctgagtagctgggattacaggctcatgccaccacacctggctaatttttgtatttttagtagagacggggtttctacatgttggccaggctggtcttgaactcctgacctcatgatccgcctaccttgtcctcccaaagtgctggattacaggcctgagccactgctcccggcctattctgggtatttctgtgaagatatttttgcatgagattaagatttaaattgatagattgaataaagtagattgctctccctaatatgggtgggcctcatccaatcagttgaaggcctgaatagaataaaaagatttatcctcccttgaggaaaggaattcctcctgcctgaccactttcaaactgggatattggcttcttcctgtctccagactcaaactgaatcatcacctcttgagccttgctggcctttggactgaaactatacaactggctctcttgggtctctagctttccagctcaccctgaagctcttgggacttgtcagcctccataattgtgtgagacaattctttataataaagctctttttacacacacacacacacacacatatcttgttggttctgcttctctggagaaccctactacacttgggttctaaatgttagaagtatcccagggaagggaaaagagtcctatctaccattcctggcacaggattaacatgaggcacactttaaaaatgatgcttacctttgatatcttttcatctcttgcaccctttttttgaactcttctccctcttctaagatttaaggtatataggactttgatgctacccttatccctctactttaatatctgatccaggcctatcttcttcctcatttatggcccaaatttccttttggcccaaatttcctttgcttttgagtcattttcccaatcctaccccattcccattaaagctcccaactcagtgtgttagatggaagctgggtggtaagggaaaagcagtttgtacaagtgattcatgtatagctgaaagctctgtaatcttctcagagtcatttgctaaatgaattggatgaaataccatgtagtttaataaagtgggatgaaaattttaggcagagtgggggtaaaatcttcgagtaactgcccaatgggagttactcaaccctacctggagtcagtcctagggttagcattcctgtgcgcttactgctttgacagattcttcccttttccatctttgaaaccagtttcaccaggggcggtggctcacgcctgtaatcctagcactttgggaggctgaggagggcggatcacctgtggtagggaattcgagaccagcctgaccaatatggagaaacctcgtctctactaaaaatatgaaattagctgggcgtggtggtacatacctgcaatcccagctactcaggaggctgaggcaggagaatcacttgaacccgggaggcagaggttgcggtgagtggagatcgcaccattgcactccagcctgggcaacaagagactcttgtctcaaaaaaaaaaaaaaaaaaagaaaaaaaaagaaaccacagtttctcccaaaacattaacaaacaagcactcccacagaagtagcaatggagattctactgctagcataggaagagagaaagaaggaaaccattagcagtctccactggatttttctaagttagcaactatttatagttttgaaagtcctattttagaagaatatgatttgtttaaaagatgatgagcaaatcagtagttttatattatatgtggtcataagcagagaaaagacctggttataggagagcagattttaatgcggtatggaggcattatgtttgaaatgttgataaatcaaatctgtcgtgaagctggtctggcttaaaatacttaggatctgtcttatcttcagctagctcttcccttccagattttgaaaccagcgcaattgtcccacaggactaatgtttacaggtttttttaataaacatagaaattgaccttccctagtcttagaactctaaacttgtatctgtctcatctgagttccttccttaggaaacctaccctcaggcaaggaactgaaacccatcagatcctcacacccagacaacgagataccagactcctcatccatcgtgactgcttccctacccctccctaatttctgttttcccaccttccctgctatataaactccccagtttcagtctgtcagagattgatctgagactttatctcctgttgaccttcactgcagcaccagattcaagccctccttcctggaaatacttgttgactcagtgactggcattctgtgcagcaaaccgcaggactaggctgaatgcttggtatttcagtaataatttcctgtgagaaggaaggaagtagttagaagaaagagcatgatcgtaataggaaactaaaaactgtgcatctatttcaatatttcaatatttaaatatatttaagcctgtcttatattaaaaaatcccctttttgaactctacttctcttactggcttctaccgtatcactctcttctttttttagaagcaaacatttatttatttatgcttattatttttttttgagacagtatctcgctctgttgcccaggctggagtgcagtgttgcaatctcggtttaccgcaacctcctaccgagttcaagcaattctcctgcctcagcctctcaagtacctgggactacaggcatgtaccaccacgcccggctaatttttgtatttttagtagagacggggtttcaccatattggccacgctggtcttaaactcctgacctcaggtgatctgctctcctcggcctcccagattgctgggattacaggcttgagccaccgtgcctggcctaaactaatacttaaaaagagtttatagttactatctccatttacttatctcccatctactcctgagcatcctagagtagatttattcccgttgtgcaaccaaaactactcttaccagtgtcgccaatgatgacacagttgcaaaatagaatgaccctttcacccttgttttacttggcgttgcagcccacttaccacagtccgccagtgctttgctttggaactgctgctctggccctcacactgttgggttctcttctacctcttcgcccgttccttttgagttttccttaccaccttctctgatgtgtccattccattccttaaatgtcattggtctgtagggttctgtcctaatgtcctcttctctttctatatactcatgttccctctgtgacttcagttataattgatacctgatgaatggcccatctctctctctctctctttttttttttttttgagatggtgtcttgctctgttgccccggctggaatgcagtggtgtgatctcggctcactgcaacctctgcctcctgggttcatgccattctcctgcctcagcctcccgagtagctgggactacaggtgcccaccaccacgcctggctaattttttgtatttttagtagagacggggtttcactgtgttagccaggatggtctcaatctcctgaccttgtgatctgcccgcctcgccctcccaaagtgctgggattacaggcgtgagccatcacgccggccatctctctctctctttaaacagagatggggtcttactctttcgcccaggatagaatgcagtggtgcgatcatagctcactataacttttaactcctggactcaagcaatccttccactttagcatcccaaagtgctgggatacaggtgtgagccactgtaaccagctaattttttttttttttttttgagacagagtctcgctctgttgcccaggctggaatgcagtggcgcaatctcagctcactgcaagctctgccttccgggttcactccattctcctgcctcagcctcccgagtagctgggactacaggtgcccgccaccacgcccagctaatttttttgtatttttagtagagatggggtttcaccgtgttagccaggatggtctccatctcctgacctcgtgatccgcccacctcggcctcccaaagtgctgggattacaggtgtgagccaccgtgcctggccaactgtgcccagctaattaaaaactttttttttttttttttggtagagacagggtcttgctatgttgaacaggctgatcttgaactcctctggcttcgagctattcagctacctaagcctttcaaagggctggggttacaggtgtgagcgactgtgcctgtcctccatctctctcgttctctctctctctctttttttttttttttttttttttttttttgagacagagtctccctctgtcgcccaggctggagtgcagtgacatgatctctgctcactgaaacctctccctcccgggttcaagcgattctcctgcctcagcctcccaggtagctgagattacaggtgcccaccaccacacctggctagtttttgtatttttagtagagacagcgtttcgccttgttggccaggctggtctcaaactactgacctcaagtgatccgcctgccttggcctcccaaagtgctggaattacaggtgtgagccactgcacccagccctccatctctctggaattgtatatctcaacagtttattggacatctgcttttgaatatgcaacatgtccaaaaaaactgaacttatcttgcctctaaacttgattgtttaaaacaaaattttagccaggtgcagcagctcacacctgtaatcccagcacttttgggaggctgaggcgggaggattgcttgagtccaggagtttgtgaccaagcaaagagtaagaccccatctccatttaaagagagacagagatggctgggcgcgatggctcatgcctgtgacctgggcaacataatgagacttcatgtcttaaaaaaaaaaaattagctcggcgtggtggcatgtgcctatagtaccaggtactcaggaggtcgggattgcttgagccccggaggttgagtctgcagtgaactgtgatcacatgactgcactgtagcctaggtgacagagtgagaccctgtctcaaaaaattaaaaaaaaaaatttcagtggatggtaccccacaaagatccacaccggaaatctggccaccatctttgattactcttttatcacccccacatctagtcgatcactcagtcttgacaatactacctgctaaatatctctcaagctgtccacttctttttccaaccttactcacactactgattcagccatttccttttctagatcactgcagcagccttctctctgattccacttttttgtcttcagtctaattccatgccactctaattcattttctgcagtgtgggtgaagtggatgtatgaaacaaaattctaatcacattttccctaatattaaagccctttaaatggttctctgttgccctcaggatgcactttgatctcttcaatagggcccccaagctttttttgttgttgttatattacaaatttaaaagaactcagtcttctccagcttcatctgtgctaatcctgcccccacctttcccccattcttgtactccaggtacacaacacatactttaattccttaaatacccctgttctctattgtatctgggcctttgcagttattctgtctgcctagaatgctcctgttacgcctctttcttatcaactttagttatctttggtttagacatcccttcttctgtgctatgctatgctaacaccccaaccccaggtcatgcttctgaagtacccagtacttacccctgtgtagcgcttaccatgccctctcaagattacctggtgaatgtattgtaagcattttgtatgcagggactacatgtctcactattgaatcctgggtcctagaaaagtagctatcacataatagatgctcagtaaatacacatcgttactttggctatgtttgccattaaatcaattaaacaagtggtacaaagctggtagggaatgaccaaaaatggggtcctaggcttcaatgttaggtttttttttttaaaagtaaagtcaaagttcagattattgcagttttacaggttggctatgggtcttaatgggcttatgggatattacaactgaatctaaactctgtccagctggtacagtctttatccaggcttcagtgttcttttttttcttaaaaaaaaaaaagctttattgagatataatttatatgccataccactcacccatttaaagtatattcctcaatgattttttcccagagcaagagtggaagtttattttattttattttatttttatttatttatttttttttaaaaatggccatgcatctgctctttaatgttttcctatgatgtattaaaataaaaacaaagtttcagtctcttcacaagaagtaatttatattctctgaattttttcagccacaacaactggattctcttttctgatttttgctgcagcttctgctttgtaatcatacggacagttgtgcttgtcagagttaacggtgaagtccacaaaacaaatttccacatcggcagtcaaacctgtaagaccaactttctttctgcacatgaaacatctgtttttctttggtttgggcaattcaggagctttttctttactctgagaagtactgggctgaaaaactgatgggctgggctgagtgacaactggctctcacacctctgttttcggggtagttattttgtcctctgttgaaatgctcatttctgtcatttgctgagttacaggcaaggcagccgcaggcacatttcttgatttttcagatgtgctgccagcagcaccttcacagttgtttaagctagtgtctgctctctgtacagatgcagaatctgaggtaggactgttggaaccactagctgtccccattgggctcattctgccactattctgctgcctctgaagatgttctttgtagcaaactgaacacattccatttgtcctaggatttccataaaagccacatcctgtgctacacagcatgggccccggggtctggttagtctcctgagccatatttttctgccaggtctgagttccaaccatccccatggccaaagggattttattttatttttaagatggagtcttgctcttgtcgtccagggtggagtgcaatggtgtgatttcggctcacggcaacctctgcctcctgggttcaaacgattctcctgccgcaacctcctgagcagctgggattacaggcgcctgccaccatgcccagctaattttttttttttgtatttttaatagagatgaggtttcaccatgttggccaggctggtctccaactcctgacctcaggtgatccacccacctcggcttcccaaagtgcttgggattacaggtgtaagccaccgcgcctggctggaagtttatttttaaaagtctttagaaaataaaaaaagagaaagtatgcttggaagacacccaagtgcgtgacttgaagaacaagtgcctgatttttagtatagtcacagaattgtgtaactgtcaccataatcaatcttcagaacatattcatcaccccagcaagaaaccccatacccattagtaattgctccttttttcaccccacccttcagcctcctctctccagcccctgggaaccctaatctacttctttgtttctgtgaacttgcctattctcaatatttcatatgaatggaataatatgtgttcttgtgactggcttctttcacttagcataatgttttcaaactttatccatgttgtatcatgtatcaatactttatttctttttattttttacttaaaatttttttcctatacagatgaagtctcactgtattacccaggctggtctcaaacaactgggctcaagcgatcctcccaccttggcctttcaaattgttgggattataggtgtgagccactgtgcccagccccgtttctttttattgccaaataatcttccattatatgtatataccacgttttgtaaatccattcatcagttggtggacatttgagttgtttctgcttttggctattacaaacaatgctgcttatgaacattttctttctttctaagagatggagtgttgctcggatcactgaaacctccgtctttccagttcaaatgattctcctggcccagccttctgagtagctgggattacaggtgcacacaactacacccagctaatattggtatttttagtagagacgcagtttcaccatgttggccaggctggtcttgaactcctgagctcaagtgatctgcccacctcagcctcccaaagtgctgggattacaggggtgagccatcaagcccagccgtggacatctgtgtatgagtttttgtatagacatgtttttatttctcttgggtatatacctaggagtgcaattgttgggtcatattattaccagaatggggtcctgaccaagtccccaagagagggttcttggatcttacacaggaaagaagtcagggtaagtctatagagtaaagtgaaagcaagtttattagagaagaaacaaaagaatggctggtccataggcagagcagccctgagggctgctggttggatatttttgtggttatttcttgattatatgctacatatggggtggattattcatgagttttccaggaaaggggtggcgatttcttggaactgagggttccttttcctttttgaccatttagggtaacttctagacattgccatggtatttgtaaactgtcgtggcactggtgggagtgtcttctagcatggttacacattataattagtgtataaagagcaatgaggacaaccagaagtcagttccatctgtatcttggtttgggcgtgttttggccagcttctttactgcatcctgttttatcagcagggtctttgtgacctgtatcttgtgctgacctcctatctcatcctgcaactaagaatgcctaatctgggaatgcagcccagcaggtctcagctttattttacccagaccctgttcaagatgcagttgctctggttcaaacacttctgacatatttcccccctcctttttacaaggggatctttaatcctaagggttgcagaggggcaaagatccatccactgtaacttctttaggctgactaggggcaatgatattcctgcctattagggtctcttgtatccagggtagagaggagctcagtcagaaagcctcagtatggtgagggcccgtcataactctgagttctgacaaaaggtgatatctgaaagactaataagtgctcaatttaagaaaacattgaataagcttttcttgcatttttacacaaagaatatgacagcaatatattccacaaaagtaaagcgaaataagtaaaattattccaagtgaactaaataagaaagcttttcatgaacggggcagttgttggaaccaagctgatacagtcactagctgattccaatacatgcccagaattaaaatattgatccagatttttacattaccttccccttttgtttcttctgagcagcagccagagatcactggttggttcacaggaagaagcagagtcagtctaaattgcagaaaaaactcaacagatgagactagaatctaataacaggtgtatcacggtttttgaaaaataatttttctctcattcccatttttattaaaaacaaatcatggtaggactcatttatttgcaaactaagttttagtcttattatactaggtctgattatttgtataaagtgcagcaagagtaattatttgccatataggctctttttaaattggatttgatggaactttgttccataaggaatctcagattagagcttttaaagcactgatcctagccacgggtttgtaccttcaaatactcgtatgaattgggtacatttctttcctctcaatttcccaggataattgggactcctgggccagaaagtgacatttttggccaggtgtggtcgtcacacctgtaaccccagcacttttggaggctgaggtgggttgattacttgacgtcaggagtttgagaccagcctggctaacatggtgaaaagcctgtctctactaataatacaaaaaaaatttagcctggcatagtggcacatgcctataatcccagctgctcggaggctgagttaggagaatcacttgaacgtgggaggcggaggttgcagtaagccaagatcatatcactgcactccagcctgggtgacagagtgaaacactctctcaaaaaaaaaaaaaaaaaaaaagtgacattctttagaaagtgacattctttacttaccacaggtcaggatcgctgtacaaggactgcatagacaaggcacgaggccagttttcccagggggctttttctgactctgtaagtcaactttgattccttaaaagtagtctttttgtacctggcatgccattccagtcaaagccttcataaaagaaccattgtctccaatggtgtcctgttacgaaagaaaacagattgttattgtacttgtgcaaatattgccatagtcaagaatacttacagtttccaaattttggagaaagaaatatgctccaaattttctttataggaatatattttacttgttaaaagctgtaaatagctcaaaagaaaagtattcttgactctgaaaagacagaaaggatcagcaatgttttaggcaaaaagtcataaaaagattattttcatcttttgttagttcagtctatgcaattagttcctgtttcactcaacatttatgtacacattagttttccaagagagtctttgaagttctttcttctctattttaatggcacactttccaaagttatcaaaggcctgcatttaagagtactcatcagagtcctatagctgattataaactgctctttaaagaggatcaaaataagacaacaattgtctgtggatgacaaaaattattatggcagtcatggttacttctgtggcatacaacaattttacaaaacaattataattattactgataatatacactaagtcatatcagtattataggagtatagcataattttggaaaacataccaataacacatttatacaaatacacccaaagaaagccaaacactgtttcatatttgacagtgcttcctgtatgattttaatataccaaataagccaaatatgtctcttttggactttagggtacctgatatctaaaggattaatcaggtcagaaaaaggcaacttataatttgattttggaaagttttcaaatattaaagttttaaaatacttgatataaaatagaatcccagcacactgtaagtcattgagccaaaatgataaagattttaaaaagggaaaaacctggccgggcatggtggctcacgcctgtaatcccagcactttgggaggctgaggtgggcggatcataaggtcaggagtttgagaccagcctggccaatatggtgaaaccccgtctcactaaaaatacaaaaaattagccaggcgtggtggtgcacgcctgtaatcccagctactcgggaggctgaggcaggagaattgcttgaacccgggaggcggaggtttcagtgagccaagattgttccactgcactccagcctgggtgacagagtgagactctacctgaaaaaaaaaaaaaaaaaaaaaaagggggggaaaacctttactcattgatagagggaagacttagctttccaaataattttctcttttctttcattctttttcctgtagtttattcaaaaggcaaacaaaaatctttcattaaaaaaaattacacaaaaatcttgttcaagagtgaaagccaagtctcacctttatgttagtgtactatattgatgttaaatccagttcttaataaaacctaatagacaaatctgttcaggtgcaatggctcatgcctgtaatcctaacactttgggaggctgaggcaggagaatcacttgagcccaggagttcaagaccagcctgggcaacacagtgagaccctgtctcttaaaaaaaaaaaaaaaatcttttttttttttttttttttttgagatggagtcttactctgtcaccaggctggagtgcagtggtgtgatcttggctcactgcaatttccacctcccaggttcatgccattcccctgcctcagcctcccgagtagctgggattacaggtgtgcatcgccacacccagctaatttttgtatttttagtagagacaggatttcaccatgttggccaggatggtcttgatctcctgaccttatgatccacccgccttggcctcccacagtgctgggattacaggcgtgagccaccgtgcctggccaaaaaaaaaaatcttatacacaaatctgcctaatcttaatcgttttatcataaggttagattcttataaaccttttataactctttacagtttttttttggttaaagaatagaaccatgctctaagaaagccatgttatgcttttattccaatgttcaatttacagataaattgaataatacccctttaattttagccagtatattctcatacagaatttcttttacaacactaatctttcataaacctttcacaacttactcaaacatcagctttatcctatcctttaactctctaaattagggaaaaaaacacatccccatactttcttataatcttttaccaaaaacacattctactttccttatataccttgcatgtaaaactgtttctctagtagtctcaattacatatgttacaatgttaactcttagcaacttttatttttggtgaaagacctggtaagtaagcaattttatttatgtgccaggtgtgtagcctaggacaccagacagaaatgcagataaggtctgactatttccaacatagttgggggcatggataactccatatgtccccaggccttacctagaatctagctacaaagcaggtaagttgtacaagtatcaaaagtcaaagaagtagtttataaccttaaaccgtctagcaaagatagtatttgacctacctaatttagactaaatgtcttaagttttgaagatgtttttattttaccaataatcttgaaaagtgtctttatttcataaagattactaaagtcatgtgaactaaaaggcattaaagtttttatttttctgacaaaatatttgatttcagcacttttcttaaagccaattaattggagctttttatataaataccacacacacaacacatataaatacacagacaagaaaaacaaaaacaagaacaaaaaacaaaacttagatacacagacagaagcagaaccaatagttgtaagatttttcatttgccagtttttaagtttttctttcccattttatgaaccctatcatgacttacacagaccatctagactttctaacttgtcttacatttccctttttcctaaataatcagtcattctactttaggacaaggatttaccatacaagatcttttctcacataatatttcttttctttataactttccttaccaaaaatacatcttcatatccataactttcttcacacctctctcccctactgtttttttctctttctaccttttttctattttcttctgtcccctgtcctaattgtcagctaagcaatactaaattacatttccaaagggccaactcttagatgaaacaaaatagagaattcatgttttattcaaaccaaggaaaagtggtgtgaataacagttcagttaagacagccagggccaggcgtggtggcttatgcctgtaatcccagcactttgggaggccaagttgggtggattacctgaggtcaggagtttgtgatcagcctggccaacatggtgaaacccagtctctaataaaaaaatacaaaattagctggacatgatggcgggtgcctgtaatcccagctactcgggaggctgaggcaggagaaacacttgaacctgggaggtggaggttgcagtgagccgagattgcaccattgcactccagccttggaaacaagagcaaaactctgtctcaaaaaaaaaaaaaaaaaaaaaaaaagacagctaggaaaaacatacactcttacacatggagatttctctaaggatgtaagttaagttaattactgactggctttcgggtggagccttttaaagaacaatgccagggaagcatgcggtttctagaacctaataagcagacacagctggaaggcaaaacagattccccaagaattaacggacccattttttttttttttgagatggagtctcgctctgtcgtccaggctggagtgcagtggcgcggtctcagctcactgcaagctccccttcctgggttcacaccattctcctgcctcagcctcccgagtagctgggaccacaggctcccgccaccacacccggctaattttttgtatttttagtagagacggggtttcactgtgctagccaggatggtctctaatctcctgacctcgtgatctgcccgcctcggcctcccaaagtgctgggattacaggcatgagccactgggccctgccaagggacccatttttgtactggatcctggatcccaaaaaagaggtaatcagcccatctcccatgggagacttatctctcagtgggagttgtggatgtttccataccttttaggtggctgagagcatgtttctctgatccaaacatgcaaagagctgagtatccccccataactgccattagccgtcccttaaatatatttcctacctagttattacacatggaggctaaaagctctctcataatgcaaagtaatttcttttttttcttttttgagacagagtttctctcttgttgcccaggctggagtgcaatggcgcaatcttggctcactgcaacctccgcctcccaggttcaagcaattctcctgcctcagcctcccgagtagctgggattataggcatgcaccaccatgccccgctaattttgtatttttagtagagacggggtttctccatgttgaggctggtctcaaactcctgacctcaggtgatccacctgcctcggcctcccaaagtgtggggattacaggcgtgagccactgcacccggccaatgcaaagtaatttctgataccccccaaaaatcaaaatgtcaggtaatgcagtgcaaaacagaacagagccttagattttgagaggcatctatcctcttttattttgtattttttgagacagagtcttgctctgtcacccaggctggagtgcagtggtgtaatctcagctcactgcaaactccgcctcatgagttaaagcaattctctgcctcagcctcctaagtagctgggattacaggcgcccgccaccatgctcagctaatttttgtatttttagtagagatgaggtttcagtatcttggctggtcttgaactcctgacctcgtgatcgacctgcctcagcctcccaaagtgctgggattacaggtgtgagccaccgtgcccggcctatccacttttaattgctggggttccatgaagaaaagagaagtttccccaaaatggggtctgtgtcacccctgtttttcccaaggagtcccagctgtcagaaattatcttaggtcctcttatgtgggcatgaaggtggcaagaataaaaactggagaaagagaattcagtcgtctgagaagaaaaagtttttgttttttccagaaaagtaagatccaagaaaaaaaccataaaggcctttaaaacgtatgcatcgcttggacatctgctttaaattaagccagcttttaaccaaatctcttattactagattctagttaagacaaacagccaatatttctggcttttggactttaccaaaggtaacttcccagatgaaaccaataagttttaactaaggttatgacttaactgtgggtgtaccgggtatttccaaagagttggtaagcagtttttacaagatatagaatctctaaaggtagcacagagaaaggaaaatttgagaagggaagccagaagttgttcatggatgggggcacatgttctcaggatctcctgagggttatgtcatgggcaaaaacaaacaaacaaaaagtaataaaaataaaaaataaaaaagaagttgttcatggagaggaaaggaattaataaatggtaaaggtcacacaaataaaccagaaaggacttattccccaggctggaaattgaacccaggccaccattgtgaaaagatgaaatcttagctactgagctacaacattgggcagtttctgttattcttcccagaaggagcctagagcagccaattttgaacttgctaaggcttttaactgctcaagataatttttagggctgtgacatgagcccccaaattcctgccctccagatggcagagaccaagagaaagtaccatggttacaatgtcagactcccaaggacataaaacaagatgaaggagaaacctcatccaggtttttggtttgtttgtttgttttgttttttggtttcattaaccagcagcaatttgtaactgaacagctttctggggtggcttgaacagagggcttacaggggtccttggcctgcattctatcctgtggtatctctttttatgacagaacgacacagaaagacaaattcatagcacaaattacactggatttgttacagcctaagattagcttcataaatcctttttcccagtaatgaaaactttgcagaggagataaaaagtgatttttaccatgcattcaactggtttgcgcacagagagagagaggaaagggaagggagagggagaaaagcattgcctgcagcagggcaggggaggcaaggagctcggggggccagggaaagacccacccattgcagcgacactggatcaaatgttcaggcagctgatcgtcagtcttgaagggatcttttctggtagtctcattggctctcaagtttccccctttagggagaaaaaagctccctgtgtcccacgatcctgtacatgcctaatcctatcactcatagccttcagcaaagagcgcaaggcagattaatccaaagagaatagtggttaacatcccgtagtaccaaatccatttttaaccaagaacagtgttaccaagggagacctctaactccctatgtcttaggagggactctgaccttcctaagttgagcctttaacccaagttcagacaagcgtctttgccctttactgtgatgggccttttaaccccttatgcctgcctgtctgcctgcctgcctgcctgcctgcctgcctgccttccttccttccttccttccttcctccctccctccctccctctctccctctctccccctttccctccttcctttccatcttccttcctccctccctccctccctccctcccatcttccttcctccctccctcccttccttccttccttttctcttttaatatataaaaatttttagctaatcttctgtgtatcagtccaattttagtatatgtgttgctgaagcgagcacaacccgctatgtcttagaaggtattctaaccctttcaggttgggcctctaacccaactttgtcctttacccaggataaaatgtaccccagcacttacccagagtcagccaattggtgctgcatggataattttcctttggagtcgggggtctctccagtattgtcccttcatggttctctggaagatgttatgggaaatgggccccaatccagaccccaagagagggttcttggatcttgcacaagaaagaattcagggcaagtccataaagtgaaagcaaggttattagagaagtaaagaaacaaaagaatggctactccataggtagagcagccctgagtgctgctagttggctatttttatggttattttttgatcatgtgctaaatatagggtgaattattcatgagttttccaaggaaggggcagggatttctcagaactgagggctcctctttttttttagaccatatagggtaacttccagacattgccatggcatttgcaaactgccatggtgctggggggagtgtcttctagcatgctaatacattataattagtgtataatgagcagtgagagcaaccagaggtcagtttcatcgctatgttggttttggtgggttttgaccaccttctttactgcatcctgttttatcagcaggggatttgtgacctgtatcttgtgttgaccttctagctcatcctgcagctaagaatgcctaacctcctgggaatgcagcccagcagatctcagcctcattttacccagccccagttcaatatggagttgctctggttcgaacacctctgacagtatggagggtttacaattcttaagaagagagaagttgctgagctttagagaataagctgaaacatgcatgaagcactaataactcttgccctgtactttgttactttagtgataaattttacagctggttctttgaataatttatattaattaagtttctctgtctgatgtgaagtagccagtgaataagcaaagcctaattctccaataaagataataaagcccttcttgagttaaatggaagtgggagaatgtcatgtctgtttctgtccatttccattcctgctccttctcctctggacgaaacagggctggctgatggaattaaccaggaaggcttcaaatggggaaattggctcatttaaactcctgctagtattaaactgttcctcagtcctatgtaagttaagacaaaaaagttatgaaactcatgtgagttataggtataggattctgttaacaagtatatcatatccagataaatatgggcaccttaaaagtagttgtcctgggaataaatacacatctattcaaaaaattctgtcatcattactcaaaatattttggtcaacttgccatgtagagttactttcaaaaccagtctgaggcctacaagaaaatcagtttcacttccttataatcacacttaggatttcagatacttgctagtctgtttatgtttattggccttttttaaatagttacccctttttatttctctagccccaagcaaggaaagctctgggttcacatagtgctccaagtacaggacaaggctcacatcatacagagcctaagcaatgaagaaagattggcatgcttcacaagactttgacctttaaacaaagcatggtcagtctgttttctccagtgtcctgtttctgctttgtgatcccctcccccactctttttgtattaaagaacccttaaacctgaggctggggacatggccttgaattgtcctctcagaggaaactgggagaatgggtagagcgaggtacttcagaggtctctttttccttctgctcgtgggtagttagttaatgatctaccagcagtccccactcttggggagactgggatcatgttccagccgcacatcacagcttagggcagagggcactttgtacacagagggagctgcatctgactttcctacttcatctgtagagtcagtagccatctgtagtcttgcatgttctcagttttcaggctccggatatgaaaatggatctttcaattttctttctctctgactctgctctgagggaaaatgaggacgtttactagcagaggaaaaagaaatactgaagtttgcaaaaattgatagaaagctgggctccctgctcatcatgcctccttcctccctagcagtttctaaaccctcagaacattacagtgagattttagctgatggtacaaacatgtctacaggatttcctcaagctggggctacattagaaggctttatactttggccatctgacctgcttttctcttttccagagtattctacttttcacaaataggtatgatctaggagttcagcctccctcacccttcactaattgcagaataagcaatgcagaggctgttcagagagtatcttatctgtggggagagggagaggaagcactggaacacttgccaggggagggaccagagggcataattataaatgaacaaccctggagcagaataggggatgagttagacacaggaaggaagctaaaggaagccagagaatttcaggaattgagggtatcacatggagaaataaagagcgagttagacagaggctgttggtggtccctaccctgacacctgaaagaactcctgatcaaggcctactatgggcatagtcttaggctaggttttagggataaagagataaataagacacagtccttattttacaagtttacagtctaacaaaaaggagataaattaacaaattggaggagatttttcagaatgtgtggtattgtgggctaggagtctgctaccattgctaatagctggcatttattttttacccaccgtcttctaagcattttatgcattaaataactcatcaactcctgacatcggccccttgaagtatatattactattgctataatccttgttttataggtaaagaatctgaggcacagaggcattacacatagcctgcctgaggtctcacagcaggcactcagaagcagaactccagcacaggtagtctggttctagaacctacgctcacactaacatagctgctaataagtcatgtggggaagctctgccacttcatgtctacatgcctttgtacccgcttgtctttccttggcctgagatactcttccttaaagcctctggtcaacgagggactcttctttgatatcttctctgactccttctgcctatcccagagccattgctgcccttggagcttacccaacactttgtcattgtattctatttgttggaatgtctgactccttttattataagcttctggagagcaaggaatttttattctcggaaaacagttataaaagtagagccaataatataatgagtttacatgtacttatcatccagcttcagtgatgaacatttcagttcaatcttagctcatctatattcccccttccaaccatgaattattttgtagaaaatcatagacatcaaatcatttcatctgtagatatttcaacttactcctaaaatacaagggcattttaagaaacagtatcacaagcatatcagaaaacattatcacagtaaaagattatttcctccttggctgggcgcggtggctcacacctgtaatcccagcactttgggaggccaaggcaggtgaatcacaaggtcaggagatcgagaccatcctggctagcacagtgaaaccccgtctctactaaaaatacaaaaaaattagccgggtgtggtggtgggaggctgaggcaggagaatggtgtgaacctgggaggtggagcttgcagtgagcggagatcacgccactgcactccagcctgggtgacagagcgagactccatctcaaaaaaaaaaaaaaaaaaaaaaaaagattatttcctccttaatatcataaaatatccagccaatgatcaaatttctgcaattaccttataattgttcttcctttccgtttttcatttatttgttctttgattccttcctttgttctttccctccctcctcttcttttttaaatagtaagattgtttgaaccagaatccaaatcagaaggactttattttttaatgttcatattctctttaatacctagcttagtatttgacatatagtaagtcctcaataaatgtttgttaaacaaataatcagaaacctagaaaaggtcctgtttgatatttggttggtttcttggaatgcctttcaatttctgataaccttagtttttcaggggttaactttggtgctagctattgtcagtgtatgaacattgccagaggtttgagggcaatgggtatatccttgactcagacatttctaggctaggaggaaatgggggtccttttttttttttttttttttttttgctttgagacagagtctcatgctgtcacccaggttgcagtgcagtggcatgaccttggctcactgcaacctctaccttccaagttcaagtgattcttgcgccccagcctcccaagtagctgggattacaggcacgcaccaccatacccagctaattttttgtatttttagtagagacggggtttcaccatgttgccaaggctggtcttgaactcctggcctcaggtgatccgcctgcctcggcctcccaaagtgttgggattacaggtgtgagccactgcgcctggcctggtccttgctttcttgtttctgttttttgtccttggtctctgtcatgggctgaattgtgttcccttaaaattcttctgttgaaaccctaacccctggtgtctcagaatgtgactttatttggaaataggggctttaaaggtgattaagataatgcctgtagggtgggccctaattgattctgactgctgtccttgaagaggaaattgggacacaatgagagacaccacagatgtgtaggtacagagaagagaccatgtgaggagacagcaagaaggcacctccaaaactatgagaaattaatttctgttgtttaagcaattcaggctttctggtactcagccatatagtcatatggcagccatatagtgttatagcagactaataacagtatcttactgcacgttaaattgtcgctcactcctgtaatcccagcacttgtttaggccgaggcaggaagattgcttctgttcagaagttcaagaacagcctgggcaacacagtgagaccctgtctctacaacaaataaaaatattagccccatgtggtggtatgcgcttgtggtcccacctattcaggaggctgagcctgggaatcgcctgagtctgggaggtcaagactgcaattagccatgattgtgccactacactccagcctgggcaacatagtgagatcctgtctcaaaaaataaaagttgggggccaggcacagtggctgacacctataatcccagcactctgggaggccaaggtaggtggatcacttgaggccaggagtttgagaccagcctgaccaacatggcaaaaccccatctctactaaaaagaatacaaaaattagcctggtgtggtagcatgcacctgtaatcccagctactcaggaggctgaggcacgagaatcacttgagcccaggataccgaggttgcattgggctgagattgtgccactatactccagcttgggtgacagagtgagactgtctcaaaaaaaaacaaaacaaaaagttggattgatcatttttggcttctttgccacttcctcagaacaggattgtaaaggagtttccagaaagcaccagtggctttatgtgtgcttggtacacagaattctaagatggcccctaatacctagaactatgaatatgatgagaaaccacacccacgattatgttaccttgtgtggcaaacaggattttgaagacataattaaggttacaacttagttgattttgaattaatcagaagggaaatgatctgagtggacctaatgtaatcacatgagctttttaaaagcaaaatcagagctttttctcaggctggtctcagaagggaaaatcagagatagtagaagtgtgagagggatttgacttgagagaggttctccatggctaagatggaggaggtcacagtgctaggacctgaaaaggtcttctaggagctaataatagtccctggccgacaacaggacagtggggaactcaaactgacttcaaggaactgaattctgcaaactaatgagtaagtgttgttttaagccactaaattagtggcggtttattgtatagcaatagaacatgaatacaggtgctttgtacctgatagattgaattagtggctcctttccttagtttatatttaaaacttgaagtaaaattaaaatacattgaaatgtctatagatctcaagtatacaagttgatttttggtaaatgtgtatacccatgcaatcactacctgaattgagatgtagaacatttccatcagccccagagctcccttgagcatctttgtcattaatcccaccctctagggcgaattctgtttttttttttttgagagagagtctcgctcctctgtcacccaggctggagtgcaatggctcgatctcggctcactgcaagctctgcctcctgggttcatctcattctcctgcctcagcctcacgattagctgggactacaggcagttgtcaacacgcccggctaattttttgtattttttagtagagacggggtttcaccgtgttagcaggatggtctagatctcctgactttgtgatccgcctgcctcggcctcccaaagtgctgggattacaggtgtgagccatcgcgcctggcctagggcgaattcttaacatctttaattggaattgcctattctggagcttcatttaaatggcatcatataggctgggcataatggctcatgcttgtaattccagcactttgggagggccgaggcgggaagatcacttgcctccaggagttcaagaccagtctgggcaacatagcgagacctcctctctataaaaaataaaaaattagccgggtgtggtggtggcatgcatctgtagtcccagctactgaggaggttgaagtgggaggattacttgagcctgggaggtcaaggctgcagtaagccgtgatcgtgccactacactcggcctgggtgacagagtgagaccccctctgaaaaagaacaatgacattatatagcatgcactcctttgtgtctggcttcttttgcatggtataatgttttcaagatttatcttttttttttttgagatgcagtcttgctctgtcaccaggttggagtgcagtggtgtgatctcggctcactgcaacctctgcctcccgggttcaagcgattctcctgcttcagcctcccaagaagctgggactacaggcgcgcaccaccatgcccagctaatttttgtattttttgtacagacagggtttcaccatgttggccaggatggtctcgatctcttgacctcatgatccacctgcctcggcctcccaaagtgctgggattacaggcgtgagccaccacgcgtccttacagggagggtctcattctgttgtgcaggccggagtgccatagtatgatcatagctcactgcagctttgaactcctggtctcaagcagatccttccaccttggcctcctaaagtgctgagattgaaggtatgagccatgctgccagcccatccattttgttttgtctgtagattgtaccctttgattgctgattagtatactatggtatggatattccgtaatttgtttatccattcatctgctgatagacatttgggtttccagtttttggctattatgaataatactgctatgagcattcatgtacaactgtttgtgtggatatgtattttcatttctcttgggtaaatatctatgagtaggattgctggattgtaaaagtgtatattgaactttataagaaagtgtcaactgttttctagagtgggtgtgccattttatatttcccctagcaatacataagaataccaatcattccccatcctcacttggtatggtcaaatcttttaaagttcagccagttgccaacaatttcttcttgagtacctctctgtgctttgcagaatagattattcatctcatgcccatcatatagtatgtccttccaactctttttataatttaattcctacctgtgcttcaggacactgtttcctaacacggaataaatgtgagaatcacttgggagtgtttcagaatacacaagcccaggtctcactacaggcatattgtatcagcttttccagggatggtatatatacttacgtatgttgaaaacgttccctaggtaattctgatgcatacccctagctaaaaaccattgatttagccccaggtcttacctattagctccatcctggctatatgttagtagtgtctgggaaggcttaaaaattacaaagcctgggccgggcgctgtggctcatgcctgtaattccagcactttgggaggctgagccgggtggataacaaggtcaggagattgagaccatcctggctaacacagtgaaaccctgtctctactaaaaatacaaaaaattagctgggtgtggtggcaggcgcctgtagtcccagctactcaggaggctgaggcaggagaattgtttgaacctgggaggcagagcctgcagtgagctgagatcatgccgctgcactccagtctgggcaacagagtgagacttgtctcaaaaaaaaaaaaaaaaaaaaaaaaaaagtttacaaagcctggatccctctccagaccaattatgttggaatttgtgggtggagtctgagcatcagttgttcttttaaaaaattccccagttattccagcgtgcagccacatttcccattagatttctcttgacttcttgtggcatttacgcctttctttttcggtattatgattatttttcaggtcttatctcctgtcttgggctttatattccttggggtagggaccttgcctttttcatttctgtatctttcatgaacacatgaattggtcatcaggaagagattctcagccacacataggttgtgtcctgggtctcaggttcacatgttaatgctacagtctttgttctccacaaggtcagaggttgcttgcgatgaaggatgtgggtaactccacagtgcagctggtagatggaggtcaccctgtttggtatgtttttaggtgtagccttggaactaagaattctgtgtgtggggtggaggggcagggatatgtagggagagagatctaattaggatggaggaattatacaaggaagtagtgataaaggaaggaagaaacttcttttttttcttttttttgagatggagtctggctctgtcatccagggtagagtgcaatagcatgatctcggctcactgcaacctgtgcctcccaggttcaagtgattctcctgcctcagcctccagagtagctgggattacaggcgcccaccaccacacccagtgaatttttgtatttttagtagagacagaatttcaccatgttggccaggctggtctcgaactcctgacctcaagtgatacacccacgttggcctcccaaagtgctgggattacaggcatgagccaccgcactcggtcagaaacatcttctctttagaagaagtttgaacttatctaataggccagagtaggccactgtagatttttgaataggggagtgtactaggagggtaatgaggcagtcatatgcaagaaagatttcggagagactggagacaagaagtcaagcaagactttgagtgttgttgagggtctgggtcagttaggtttatgggaatggtgagaacagcataactgacagttgttaaaaaaggatcaagaggctttcacaatgtattgaatctggaaacaaatgagcaggggctgtggaaacttagggggtgtcactgggagaaatgagtgagctgtgtgggagagcttgtttaaatgggtaacttcagacagtatttggatgtgggtgtcatgagttctggaagtagttggggctagagatataaattaagagccatctccagagaggtcactaagctgatgaaagagggtagatggagggagacaagaagggtctgagtactaaatctggtgtgggggagcagtcgtaagtgggaaatggagggaggagagctttccagaagggaaaagttgtctgtcatcttagatattgtaaaaggaaaaagtgtgaggtccctaaaaatgcctttggatttggccaagacatggatactgattttgtgctgttcccagcgatcttgggtagggaggcactgcagagggccaggaaaaattaggtgatgaggaaaggcaaagacaacacatgtgtttcaattgcttggaagtgaaggaaatgaggttatagcttagtacttagcagaattaataaatgaaggctattcgggttagaagagatccgaccctcctagagggcagaataaaggaattgggaaccaggaagagttagaaggtctagagggatttctatgtgaatgaacctgtggagacccttgtatagctacatctgattcactggagccgctggtgtgggaagtgttgttggcccctaatgaagaggctgggaggtcttttactcatgagatcatcttccctcccagaggaagataggcacttcctcccaggcaagttggagctgtggtctgttgctcccagatatactcactttgttagcaggtatgcaaatgaatttagctaattctctgatcactagatcaaatatctgtaggcttaaaaatagtttcacggccgggcgcagtggctcacgcctgtaattccagcactttgggaggccaaggcgggcggactgcctgaggtcaggagtttgagaccagtctggccaatataatgaaaccccgtctctactaaaaatacaaaaaaattagctgggcatggtggcatgcacctgtaatcccagctacttggggaggctggggcaggggaattgcttgaaccagggaagtggaggttgcagtgagcggagattgcgccactgcactccagcctgggcgacacagtgagactctgtctcaaaaaaaaaaaaaaaagagttttactctgactccccattgaacaatttgtttattctgcctgtagagaaaaacattgtccaaggtagtatcaaccatgaggcagcatgtcgatgtctgatatattatttttattataaaaacatagaataattttcatacataattcagacatgatcttagccaggaaaaattaaataacacagcacagcatggatgagggaaagtatgcacagtccgtgtcagggttagaaaaccctgaaagaggtacctgagtatagagaactccaagctaatcctcctggagaaagcctcttaggcctaacatgagatcaggtaagcaatatagaataaaacctttctcttagccccaaagagattccatctgtgtagaagactgggtgagaagtacatttgcctgtcttcctcctgtccttcctttttattataagatacatttatagaccccatagaagaaaagataaatttcagaggctgttaaaagaggctaggcctaagttataatcctcctcctcacagccccatttccccaaggggcattagcaccagtgcagctttctagctgtaaacaatgccaccagcatgagtgatagtgtccctgtagggtgctcccacttctcaaggaccaaatacaccttagcagaggccaaggtttcctgacaaagtgaatgggggcaaacagaaaatgcacaggtgcaaacatggaatagaatggtagttgatgattggtctgaggtgcctagaaactgagttaaatctagctctagccatgaatgaagaaaaccttttcttattttctatttggagcctctgacaaaaaaaatcttgagaggctcctgaccaagggacctgagggatttcggtggtttctttcacctaaggcaatcggattggctgacatagctaagctaagtaaaaataacccttttcacataaataagcagttacaaaaattaaaatggtggaatgtctcagagaaaaggagaaaaatcccaataccccaaattgtgtattctttaacaataatttaaataatcgctgaagggcagctctctgattcctttcccaagttcctagcagattgtgtttatcagaagctggttccctcctgaagctataacccctccctctcagcactgccttgaacagagcccataaagatattaaaacatatatgtgcttttgcattttccatcaggaattgccttggattttggcaagtgattttcctagttgcttctagtgggttctctgaagacaggcttgccagaaggattaggtggtattctagctaagcaccaaggtgcttagaccctgatcctacaggtagacaaccctgacagtggacaaaggtgtggcatttcactattggttatatatttgattttcttgtgtttggtgagttcacacaaggctttggagaaataggagaaggcattactgcctttactttctctctctcttgtttcctggcacatgtacttaatggaaaaggacataacctcaaggctatggcaaatccgaattagagtgataggacaggactgggggtgggaaggaatgagtgctctgaacaggcaagtttaaaacaagtccaggttgggaaaaggggaagggaggggaagttctggtccctctttcccaaagtcagctttgccaaatttcaatgacaagaaggttgggtttcctacagactcccaatgtactttcatctattgacactgagagaggggcagtgaccaggcagcctggagatgcctattaggaaggaagagtaggagaaagttgtttctgtccccacccctctacccctacaggggaaaggaatctcctagtgatgagggtgagagacttgaaatacatcagcactgcagtgagcaggacaggtttcattactgcttttttacttctgaataaattatttctgtggctgttagggatggggaggctgaagttggttgtgtgggttgctgggcttcaaagttcagggtagaataagtaacttcattcatctgaaaagcacaaataatgatcagttaagtcagtgacacagggcagggcctcaccttgcctggtgtgattcagcaccacaagctgttaccattttgaaattttagctctggagaagggcttttgttgttacccattctctgcttgctgacctcctgatgaatgatcattagaagagagaaattatggtatatatgcaatgggataggataatgcagcaatgagaaccagcaaaccacaaatacatacaatatggatgagtctcacaaagcaatgttgaagaagccacatataaggatatgttttatttctcctttagataggaacaaaaccaagcaatactaatctggagcattagaagtcaggatagtggttactcctctttggagggaagtgactggtagagttttttttttttgcgacggagtctcgctctgtcgcccaggctggagtgcaatggcacgatctcggctcactgcaagctctgcctcccgggttcaagcgatgctcctgtctcagcctcccaagtagctgggattacaggcatccactaccacgcccggctaattttttgtatttttagtagaacaaggtttcactatgttggccaggctggtttagaactcctgacttctagtgatccacctgccttggcctcccagagtgctgggattacaggtgtgagccactgcacctggctggaagggtctctttttaaggggaggtcatgtagtatttcatgatttgggtgctgcttacctgggtgtgttcaacttgtgaaagttcatacattgtgaaagtataattatgatttagcacttttcagtatgtatgtttgctctattgaaaaggtaaaatgaaaacttcttttttttttgagacagagtttccctctgtcgcccaggctggagcgcaatggcgcaatcttggctcactgcaaactccacctcctgggttcacgccattctcctgcctcagcctcccaagtagctgggactacaggcgcccgccaccacagctggctaatttttttgtatttttagtagagctggggtttcaccatgttagccagaatggtctcgatctcctgaccttgtgtttcacctgccttggcctcccaaagtgctgggattacaggcatgagccactgtgcctggccataaaatgaaaaattctataaaattattattaaaaaacaggatctcagatctattaaaattgaaattatccttttgacaataagagcaggatcagactgaaggtaggggagtgagaatgattcagtgccttccttttttaggccattgtgctgggtgctctttgtaggttatctcgtttaatcccttcaacttctctttgaagtaggcagaatgcccattttacagatgacaaagctgatgatcaaagaggttaagttacttgacaagggtcacagagctactaagagtcacatccagtattcagacacaggatgggaataattccaaaatgcatgttcttgctgcaaagtagactcatgggagtgattacaaatacgtctttgttgttgcactgaggaacattaacccaaacttgatgttacattgtgtcttcatgaataatcaattctacacagaatcatttccatgagaaaataagcccatgaaaaccggctatgcttaccttgttaggtgggtcattggagtggtcctgagctggagaagcaaaagaagagttagcgatccatggaaatgcaaagctgacttcaggtgattctagctgaaggaggtggcagttggagggtggggagtttaaggatcagttaaggaatttacttccctcagagtgtatggtccagacccagcatgttagtaccagagagggggcaggggcagaaccacaggaggccacaatccacttgtgaagagttctaccagttcacaaggccttgatttttgcccagatgtgtttctcagcaacatgctccagtggcaaggaggggcattgagacttgtagcacccacagcacccacaagataaggaaagtctcaccaagggagagtgcccacatccgtaatagaggcaggaggcggaaggagtaaggctgaggaaatggctcctggaaacatgggatcttcctcaggcctgcctggcctaggcagagtgagcctctctcctcagatgtgtctcaggggactcctgtggctaggaagggtgggaagacctatgccaccttagggttgggaaatagagatcctttctgtgaaaattcagaagggagggagtggtttgggaatccaggattccctgccaggggagggcacgtggtggaacataccagttctcactggggtaagtggctttacttactgtggttggagactgagggtttgtgctctgtgagatcacgctggtcgcttgccctaaataaatatcagaaactgtgactgctattcccaagcacaggatctttgttccgtaagttaggaaggacactgtgagcaggtaattccttagagtccttgatgttcatactgcctttcttctgagggcctcgttcttcagtctaactacaatcccttctagtgtttactcttttcctgtttgctggatgttcacatttcatttcattctttatcagctgcttctgtgcctacttctatccttaaaacctttcccattttgttttccggggtagatacttttttttttttctctatttattgttcaagaggactttggttgtttttgctttctcttaggttctcttcctatgctatttctccctcctcttccaatgtggtcaacagagcacatgacttgctttctcctgctgcttctttcattttttcatttgttttccttcttagaccttgctttccctgactaggggacagaggaacatacttgagtctcttcctctagattagatggggattggaatacccatgtccaagagataatgggagacagggagcacgaagaccagggaagaggaaacctgtgggaattagtgccgagaagcaggagtttagtgggaggagtatgagatccaggcccagagacaggcaaagaattctttccctctcccaagcatggcagtcagccttggaggaaacagaacaagaggaaaggccatcatacctgccggtcttcccgaaatgcagaaaacatgccagggctactgctatcagagcaaccagggccactactccaatcacaatgccagcaatggccccaggtgagaggccattttcttgtggtagagcattatctgtcatggagagaaaagaggagaagaaatgaaagtgaaattattttacaatgggggctgggaaacaactctcagaatgaagtagtttctaattgttccttcaaggaatacagtttcgttgtgggaaggttgctggaaggtgattagctaactatatccttgcaatttttttttttcaatcaccatgtttctttttttcttttcttttttttttttgagacagagtcttgctctgtctctcaggctggagtgcagtagcatgatcttggctcactgcaacctccgcctcccaggttcaagcgattctcctgcctcaggctggactacaggcacgtgccaccacacctggctaatttctgtatttttttagtagagacggggtttcaccatattggtcagactggtcttgaactcctgacctcatgatccgcctgcctcggcctcccaaagtgcttggattataggcgtgagccactgcgcccaaccccagtcaccatgtttctaggttgatgatctctcttctgccaattccaccctggcttttctgcgctcagccatttttaaggctttgaaatatgagaaaggctgattgctattttgtatgtgattagaactttccacctttttcgtggttgcatctttttctcagtgtctcagttgtggcagttggtgcattctgaattcaccacctcttttgcatagagaactggcttcccacaggctcccagcaggggtatgaaagctagcccagttttgtgtgactgttttattctgaagtgtgaatggctggaggactccctgtcagccttgcagaaatgctcttagaactgcactgcaggccgggcgcggtggctgacgcctgtaatcccagaactttgggaggctgaggcgggtggatcacgaggtcaggagttcaagaccagcctggccaagatggtgaaaccctatctctactaaaaatacaaaatttagctgggtgcggtggcaggtgcctataatcccagctacttgagaggctgaggcaggagaatcgcttgaacccggggggcagaggtttcagtgagccgagatcacactactgcactcaagcctgggcaacagagtgagactctgtctcaaaaaacaaacaaacaaaaactgcacttcaatctaaaacttccttcctctctttctcttccacaggaatcagatctgcatcatggtctgaggttcctctcactctcgccttactttccctcacaggcattttccccaataaattatctcgtatgtttaatcccatcttcactgtatctcagtagatggaaactaacataccaggcttgagactttgctttacctccttttttccccctttcccatatttgatcatagccatgtcccagtgggtttcttgtataatgcttctccctccatatatatatatatatatatatataatatataaataataccttttgcatctatttcttcttcttctttttttttttttttttttttgaggcaggttctcactctatcacccaggctggagtgcagtggcacaatcatggctcattgtagcctcttgggatcaagtgatcctcccacctcagtctcctcagtagctgagactataagcacatgccaccacacctggctaatttttttctttcttttttttttttttgagaccgagttttgctcttgttgcctaggctagagtgcaatggcgtgatctcggctcactgcaacctctgcctcccaggttcaagcgattctcctacctcagcctcctgaattgctgggattacaggcatgcgccaccacgcctggctaattttgtatttttagtagagacggggtttctccatcctggtcaggctggtcttgaactcccgacctcaggtgacccgcctgcctcaacctcccaaagtgttgggattacaggcgtgagccaccacgcccacccacctggctaattaaaaaaaaataatttttgtagagatagggttccactatattgcctaggctggtcttggattcctgggctcaagagatcctccagcctcggcctcccaaatgttgggattacaggtgtgagccactgtgtctagcctatttcttgtttatatctgttgcaactatttggggcttaaccctcaccagtcaactcaggctggtgactaatgctatgttagctacttttgtggagtacttcctgtgtgccaggccctgtgctgctaaatgctttacatgtatcttatttgatccataaaatagtgctgtcaggtagacattatttccattttaaacatgaaaaaatggaagcttagagtggtaaaaggcttacctaaagtcagatggctagtgagaggtggatctgagatttgaccctaggactacctgatttcaaggctaatgataatagtagtagtaatagcagctaacatttatgaaacatttcctctgtgtgtggtgttttgctgaaggtttattattacattaaatctttaaaataacactatggggccaggcgtggtggctcacacctgtaatctcagcactttgggaaacagatgggaggattgcttgagcccaggagttcgagtccagcctgggtaacatggtgagattctgtctctctgaaaacaaaaataaaaataaattagccagatgtggtagtatgtactacttaggaggctaaggtgagggaattgcttgagcccaggaggttgaggctgcagtgagctgtgtttgcaccactgcactccagtctgggtgacagagtgacaccctgtctcaaaaacaaaacaaaaaccccaaacccgtgcaatactatggagcaggcattcacagtgcaattttcggttgaggaatccgaggctcagagtagttaagaatcttgtgcaagaaagaaatttataactgtaggccaggtacagtggtgtatgactgtaatcccagcaatttgggaggctgaggcaggtgtatcacttgagctcaggaatttgagaccagctgggcaagatggtgaaaccctgtctctacaaaaaattacaaaaattagccggaggtggtagtgcttgtctgtagtttcagctacccaggaggctgaagcaggaggattgcttgaacccgggaagttgaggctgtggtgagccatgatcagcctcggtgacagagtgagaacctgtctcaaaccgaaaaaaaaaagttgttcttcaaaaaagatcactataattgacaactgttaattagattgactaagaaagaaagaagattcaaattactaaagtcagaaatgaaagtaaaacattactactaattctgcagaaataataaggattataagagtactatgagtaattgaatgccaacaaattggataacctggatgaaatgaacaaattcctagaaacacaaaacctgccatgatagaatcatgaataaatagaaaatctgaatagacctataaccagtaatgaaaatgagtcgataaaagcatttgacaaaattcaacattctttcatgctaaaaaacactgaaactaggaatagaaggaaattctcaacataataaatgctacatgtgaaaacccccagctaccatcatagtcaatggtgaaagattgaaaacttttcctttaagatcaagaacaagacaaggatgcctgcttttgccatttctattcaatgtagtattggaagacctagacagaacaattaggcaagaaaaaaaaagcatctagattggaaagaagtaaaattatacctgtttgcagaatacactaacttatatatagaaaaccctagagattccacaaaaaaactgttagaataataaatttagcaaagtggcaggatacaaaatccacatgcaaaaatcagttgtatttttgtatactaataacaattcaaaggaaaattaagaaaaaaattctatttataagagctttaaaaatacttagaaataaacttaaccaaagaggtgaaagatttgtaccctgaaaatacaaaacattgccaaaagaaattaaataagacataaattgaaaagacaccccattttcatggattagaagacttaatattgttaagatgacagtactacccaaagtgatctacagattcagtgcaatctctatcaaaattccagtaatattttttgcagaaatagaaaaattcattctaaaatttatatagactctgaagggaccatggatagccaaagcaatcttgaaaaagaacaaagttgaagggctcacacttcctggtttcaaaattttttacaaagctatggtaatcatcacacctgtaatcttagcactttgggaggtggaggcgggtggattgcttgagctcaggagtttgagaccagccttggcaacatggtgaaacgccatctctacaaagaaaagcaaaaaaacaaaacaaaacaaaaaaacccaaacaacaacaataaaacaaacaaacaaaatccaaaagctacagtaatcaaaacagtatggtactggcaaaaagaaatagaaaccagtggaataaaatatagagcccagaaagaaatgtttgcatacatagccaaatgttttttgacaagggtgccaagatcattcagtggggaaaggatagtcttttcaacaaatggcattgaagaaactggatatccatgcaaaagaatgaaattgaacctttatgtaacaccatatataaaaattaattcaaaatgcataaaagacctaaatgtaagagctaaaactataaagctcttggaagatagagtgaaaactttggaacattgaatttggcaatgatttcttggctatgacactaaaagcataggcaacgaaagaagaagtagagaaattggacttaatgaaaattaaaagcttttgtgtatcaaagcacattatcacaaaagtgaaaagacttcttatagaatgggagaaaatatttgagaatcatatatctgataagggattaatatccaaaatatataaagaactactgcaactcaaccaaaaatccccaaacaacctaattaaaacatgggcaaaggacttgaataaacatttctccaaagaagataaatggcaaataagcacatgaaaagatgctaaatattgctaatcattagggaagtgcaaatcaaaactccaatgatataccaccttataaccattaggatggccattataaaaaacaaaacaaaaccagaaagcaacaaatgtttttgaagatgtagagaaattggaactctagtgcattgctggtgggaatgtgaaatggtatagccactgtggaaaatggtatgatggttcttcaaaattaaacaggattaccatttgatccagcaattccacttctgagtatctatttaaaagaactgaaagcagggatttgaacagatatttgtatacccatgtttgtaatagcattattcataatagccaaaaggtggaagcaacctaactgtccatagatggatgagtggataagcaaaatgtgatgtatctatctacacagcataatattattcagtctccaaaaggaatgaaattctgatacattctacaacatagatggagcttgaagacattgtgctaaatgaagtaagccagacacaaaaggacaaatattgcatgcttccatctgtatgagaggtacttagaatagttaaatacggggtgggcagagtggctcattcctgtaatcccagcactttgggaggccgaggctgagaccaggagattgagaccagcctgggcaacacagtgaaaccccaactctacaaaaaaacttaaaaacttagccaggcatggtggtgcaacctgtagtcccagctactctggaggctgaggtggcaggattgcttgaacccaggggattgaggcgggagtgagctttgatcacaccacagcactccagcctgggtgacagagtgagaccctgtctcaaaacaacaaaacaaacaaaaaaacccaaccaaccaaaaaaaaccaactaagtatatgtatatttgattcagagcctgagctctttttttttttttttttttgagacagagtcttgctctgttgcctagactggagtgcagtggcaccatctcggctcactgaaagctccgcctcccaggttcacgccattctcccgcctcagcctcccgagtagctgggactacaggcgcccgccaccatgcccggctaatttttttttgtatttttagtagacacggggtttcaccatattagccaggatggtctcgatctcctgccctcgtgatccgcccgccttggcctcccaaactgctgggattacaggcgtgagccactgtgcccggcctgagctgagctcttaaccactttgcaattctgtttgctataatggtctcttcattgatattctgcctcctgtgagttttatccattttgcacaccattgacagagtaatcctagagggacatataggaaggggtgaggagtcacttacagtttacgttcagcatgatggggtcgctttggttcttactgattgggttgaagacctcacaccaatacgtcccagcatcctccctcttgacagggtttatgctgagggtggtgttgccctgggacagcttcatcctctccgaggacgggagactctggtttttgaagaaccaacggatggagattccagtgtcatttgtggagcaggtcaggttcacagagtccttatctcctgtgactgtggtcttgctggctttgatttggggctttgctactactggacttagctctgtggacaagcagagtatctgagataacctactgagaatagggttggggcctggggcctagggctatgctcctttccctgagattttagccagctctcaggtcccacagtgagctgtgcaaaggtcaccaaccaggggatagccctgaccctctgcagaaggtcgagtgtctttgttcaggtgatgaattgtaaggagagggctgcacctccctcctgaccccagatcgtctcagagtgaccctctggatatctctatatctccacttggaatcttcttctcagcgcacagaccgagcaacctcatcatcaggtagaatgtttttcccactgactttttttttttttttttcagacggagtctcgctctgtcacccaggccggaatgcagtggcatgatctcagctcactgcaagctctgcctcccgggttcaagccattctcctgcctcagcctcccgagtagctgggactaaaggcatgtgccaccatgcccagctaattttttgtatttttagtagagacggggtttcaccatgttagccaggatggtcttgatctcctgacctcatgatccacccgcctcagcctcccaaagtgctgggattacaggcgtgagccactgtgcctggcctcccactgaccctttcctggagctgtgatcaggcatccttcctgtgactgtcactttacatacaaaagggaaggtagtgttttttttcattaaataattttttagggaatgatgatgccccatccagtcttcatgaccttactatctggagttccaatccgaaggatttcccactgtaaagaggagttttacttcctggtctgtggatagaatatcacggtgaaggagattcctagagtaggcacagtgttaacaaaaggctgatattcttaccttctctacaaatacacgctgtttggcattgcccattctctccaatgcagagcccctgtggctgaatctcccgatttctccaagtgtgggtcactcgctgtgctctgtgctatcccatgtgctgtgcccacagcctcatacagctggtgacttcagagccaggacaagctcagggaggcagcctgacccaggggaggctcaggtgttgactgcctttatttatttatttatttagtttttgagacagagtctctctgtgttgtccaggctggagtgcagtggtgccatctcggctcattgcaacctctgcctcccaggttcaagtgattcttgtgcctcagcctccctagtggcatgcctagtggcatgtgcaaccatgcctggctaaatttttttttttgtatttttagtagagatggagttttgccatgttggtcaggctggtctcgaactcctgacctcaggtgatcctctcacctcggccttccaaagtactgggatcacaggcatgaaccacagcgcccagccattgactgccatcttgatttagctggattcatgacaggccacctggacaccttctgcacacacctgcgtcctaccccacatgggatcagggcagagccaatcaccgggcaagccgggagtagagcagggagcagagtctgagctgctcatccctgatgaagggcatttccttctctcatttagggaaaactattgtgagtctgttttaaaacctcacatattccttatatctcatggaataggtaaaagaaggccaagaagttacagaaagggacatgttagtgacagaagcaaattgaccttgaggaccctttctgcttccccctctgtgaagcccctcctgctacacggggctttctggggctgagagaaccccctccccacattccaggctggacctaaggtcagctgtgagaaatcagaaaaacaaagggaagagagtctgcacagatgaattgagagggttcaggggagaatttggacttgtttgtgcctgttggatacaggctgcaaaagaaaatttcttctctgctcctatttgaaaaccagaaagcttgtaccccagatcttagtgttgatgctccaggaattacttaccagtgactatgatcgtcttgactgtggtcctgttgcagccagtgactgagttattggcgtggcaggtataggatccactattattcacagtgatgttagggataaagagctcttgtgtgctttgctggaatgttccattgataagccaggagtactgtgcaggtgggttagaggctgcatagcaggagaggctgaggtttgcccctggacggtaataggtgtctgaaggggaaatggtgggggtgtccgggccatctggagcaaagagaataaagccacaggtgatgtcatcagagggaaggggaagctgctggtctggagaagggccacagtgttcctctctactaagtcacaaccctgaagtcctaaccaaacctccattgtgtccactgagtctgggtctgagacattcacctgtttctcccatcacaggctgtggaccctgagcctcccaggacaggagcagcctctcccctcctattcttggttcaggctggggctgcccaggtttgcctggggaaaggaagtcatggccagcctgggtgtccagggttaagggtctgcgtccttagacctgagagggactgagaggcctggcctctggctgcgtggatttgggctggcagcctgggccacagaggaacagaagatactcacaggtgacattcaaggtgactgggtcactgcggttcgcactcactgggttctgtatttcacactcatagggtcctgtgtcattccttgtgacactgagtagagtgagggtcctgttgccattggacagctgcagcctgggactgaccgggaggctctgattgtttatccaccacaggtaggttgtgtcctgagtctcaggttcacaggtgaaggccacagcatccttgtcctccacagggttggagttgttgctggagatggagggcttgggcagctccgctatgcagaaaacagagagaagattgccctgtgtggcacctttgattcctccacaggcatttttcttttcttatttatttattttttttggagatggagcctcgctctgtcacccaggctggagtgcaatggcacgatctcggctcactgcaacctccacctcctggattcaagcaattctcctgcctcagcttcctgagtagctgggattacaggcacatgccaccatgcctgacggggtttcaccgtgttgcccaggctggtctcaaactcctgagctctggcaatccgcccgattcggcctctcaaagtgctgggattacaggcctgagccaccgtgcctggctgggcatttttctttctttctttttttttttgagacagagtctcgctttgttgctgaggctggggtgcagtggcacgatcttggctcactgcaacctcttcctcccgggttcaagcgattctcctgcctcagcctcctgagtagctgggactacaggtgcatgccaccatgcccggctagttttttgtattttagccaggatggtcactgttagccaggatggtctcgacctcctgacctcgtgatctgcccgcctcggcctcccaaagtgctgggattccgtccgggcatttttcaatcagagttggcatctccccacctctcagccaacccaagtccctaaaagcccatggcaagtgtgtgtttcacaagacagatgtgcaatgatctgagggctcagagaccgtgaggccgcctgctctgtgtgagagaagcacagactttctcaagtgtgaactgagcagcagtgttgggtcgtggacagaccgaggactgggagtcacagccccaggcacttctggtccttccctgactggctgatgcctgcctgacccacctgtgggtcctcacctggaacatacaggtgctgggtcccttccagcttcacagtcctactttgccccactaggtgtgttttctctgcagcttccctgtctgaggacatcctagagatgggtgatgatgggacttcctattgtccttaaaccctgaggatactgagcagcctggcctgggactgtatgtttcagcagaaataacaggggacaccaggggcaagcctgaaggtagctcagtcgtcaggcagcagaaccacaaggtggggcagtttttcccaggtgtttgatgatgactgacttgagccagtgaccccctaaagatagagcagagtccaaggaatgatctagaaaagagtgagggtgacaggcaggggctgcctggatttaacagcatatctacgttccttgtctttggtctttaatgtcccttttccccctgaaaagagcagatgatgacactgtggatcttttctgaaatatgtgggttttttgcaaatgcagaataaccagctagtggaacggaaggagcatgaacttgctgaaagcctgaccctcatggaccgtgtgtgtttggtagatctgggatataaatttgagaagttaaattattccatttgtgaaaattgttattaatactctggatctaacaccaattaataagaggaatattctctagagagcgtgataaactcttaaaccaagctctgaagtccagtaggatcatgttatgatcaaagaaagatgctgaagtcagtttgaaatcagtgactccctgggtagaagggactcatgggtcctgttaggaagacagaacttgtcagaaaggatatctgagagttctcaattgcattaagagagaaacgatgccatatgaggagaagtgatgtatgttatgttagtaaatttagaaagagttctatgttacaaattcctgtggaaattcaggtaaaaagaggaacccaaaacagtcatgtgaaatgctttcttccttttctctcaacctcaggaaacacaactagagtttgaccaaattcatccaaattgggcagagtctaagtgagacaccagtggctaatgcatctccctgtctgagagatcccaccttatgacaatggtgtcatcatgaggacacaggtgtaggtggaatgggcagcaaacccatcagacagcacctgcctggctagctctacctggggaaggtcccaggaaccactagaggatgtgagcccacagcagaacagggatggagttaggagtcaaatgggtgaaatgagcccatgggctttggggactgcagacctgtccttctgcctctgatcccctggtgagtcagtatagagagtgtatggaggagtcgctcgtccctgtcccctggcctgttccacatgtcagcctcactgagggacgtggggacagtggcttatgatggacctggcaggggtggctgctctgggctcatttctgtgcctttcctattgcctgggaggtgggcctggccacagtgtgagcgggaagggaacaggacagtcaaccttgttagacggagtgtctgggaaaggcctaagggtggaggaaactgtgcagttcagctgggataaaaggagaggaaaatgaggacatggaggagcagagagagtcagagatgcccatgacagtgagcagtgggggctaagtgaccttagagaccccagcaaccaggagcctctggtgtcccagaaccaagaccagggagccctgaaaaccttcccacagccgagcagccccagagtcacatgaaatatggtacttggggtggctttaggggtagatggtcaggggatggaacatgggtctcagtctctggagggatggggagcaggtatggcaagaacctcccaggattctgcaaccagatccagtctctaaagaggttatggatcattcaatcattcattcattcgtgagagaactactgagtgtgtgtttcatattgggccctggctggtgcagggtgtgagtgaggagagaaagcaaagtcctttcctttatcctcctgtgggagtgacaccaacacatcaggaaacacaggatttcaagtccagggagcagaggtgtgggtctgaggggataggcctgaacattttttttttttttttttgagatagagtctcactctgtctcccaggctggagcacagtgacatgatcttggctcactgcaacctctgcctcctgggttcaagcgattctaccacctcagcatcccaagtagctgggattagaggcacgcaccaccatgcccgactaattttttttgtatttttagtagagatggggtttcaccatgttggccaggctggtcttgaactcctgacctcaagtgatccgcccaccttggcatcccaaagtgctgggattacaggtgtgagccaccacacctgacccaggcctgaacatttctgacactgactctaattgttgaataagttccagaataaaacttggttaattctccatttgatctcactccccagaccaggatctcccctctgggctgcagatgcctaagaagaaaggaactgaaccaactctggtattggggtccacagatgccaaataaggcccctggagtagaggagaggttaagactgtggctgaagacaaatctcctgtaactgatcttccagttacggtctgtgtgaccttgatatagtgactgtatttattgccatgtggctcagtttcccctcagtgaaatagtataaatggttaatggttttggcttatcttgtggtctgtgaattaaccttaaaatatttataattatttgacctcagctctgcataggggagctgcccaaataaacaatcttattttattttatttttttgagatggagtctcgctctgtcacccaggctagggtgcagtggtgtgatcttggctcactgcaacctctgcctcccaggttcaagcaattctcctgcctcagcctcctgagtagctgggattacaggcacgcaccaccatgcccggctaatttttttgtatttttagtagagacggcatttcaccatgttggtcaggctggtcttgaactcctgacctcatagtccatccacctcggcctcccaaagtactgggattacaggcgtgagccaccgctcccggccgcagcatctattgttgttggattccctgagagtgcctctcagcctgatccctggtggacaaggagctttcaggagcatcctgtctcctctgttcctcctcctggggatggtaaacttcctatggcatctcctaagcccccagggcagttggctgatggcctggggagcttgtccatctgtcctctccaggctgagactaaggtgaaggatgaggctccatccttgcccaaatgaggctctagtgcctgaaccctggctggttaccagctccaggagccacagccctcggatagctcaaattcttgttcctagtcagccctgcccaggaggccacaatctagccctggcccaggctcctcagggtcaccaggagttgagaaccttgggatagtgttttggagcaggggattcccagggctgagcttgtctgtgaggatcccagaaggcccttcaggccagaccctgactgagtcctactgggtctttcttagggacatgttcaccaggagggtcccggggggctagattgagactggtctcccctcgataagttacccacatcagattgtccttcctctgaagcaaatgtctgcaggatcaggactccagagtaagacattcggtattttgatgtctgtcccatagtgtgtcctgcactagatgctcaaaccttaacatggggtataatgcagaggaggacacaggcacagcccaggcctgacaatcccatgtgtgggaagtagaactaaccccccaacacccagaggtcatggggaaatactcacggtatacatggaactgtccagttgcttcttcattcacaagatctgactttatgacttgtagggtgtagaatcctgtgtcattctgggtgacgttctggatcagcagggatgcattggggtatattgtctctcgaccgctgtttgcgggccctggggtagcttgttgagttcctattgcatatcctacaatttgacggttgccatccactctttcccctttgtaccagctgtagccaaaaagttgctggggcagattgtggacaaggagaagaacctccttcccctctgcaacattgaatggcatggattcagtagtgagctgggcagtggtgggcgggttccagaaggttagaagtgaggctaggagagaggagagagcatcagtcaatattgggacctatgcattagggtagaaaaatggggccttgggtcctgagcaggtgtcttcacccctccaccttggagtgtgtgtgtgtgtgtgtgtgtgtgtgtgtgtgtgtgtgtgtgtcctactgggtcaaggtcagcagtgtgactcccattcccttagtgcctctgaccttgtcatttctctggaatgcccttccccagggatccgcatggctccctccccactgccctcagatcttgatcacatcagggtgctcttgggagatcctttccctgacacctcccctagagaccctgggtattccctttctgacctttttctgctctgttccctccagggctcttgtcaacacctgacctcacattctagatctctttgcttgtctgtcttccccacccatgagagcgtgagctccgtgagggcagggatttgtgtgatgttggttgcaccccagtgcctgggataggctgcagactcctgtggatgagttagtgagcattcccagggctcttcatgtcctggggtttatttgccaatatctgaggttggtggctcagggctctgtttaatgccccttttaaaatgttttccttaattgtcacgctgacttaaattgtgattattgtcagcagtttttgaaatttattgctcattgatgattcagttggaaaaggtaaaaaatgggagattgtttattcactaacagtttcagatcactgagactttccttttatgatctctatccctttcatgtcctctctcctatttggctccaagagaagccctctgtcccctcttagagctccatcctccccagaggaccctagccattctctgtgcgccctctttccgccccttcccagggtgtcctcccctcacctgtgagcagaagcccctgccagggtacacgcactctgtgaagtggggctgagaggtgccccatggtgtctcctgctggccctgtcttcacctgtggaggagagcttgggctccaggaacgcttcgagcacggctgctctgtcacctctgctgttttccactctctgtgctgagcctcctccctggggcccagagctttgtctgatcatgtgtgctggggcggggtttgtccaggaagctctgtttcctctcctctcattcctacctttgtccttactttctctttcctttctgtctacattttggtttcccagaccacactttgagaatcaaggctgatgagacctctgtccccatcaggggaggaggatcccccctctccagcactgacctctattgtgtcctggctatgggtctgtcagcagcacacagagaaccctggcatatccaaatgtggtaattattttctttgcaacacagtgagctgccaggtctccccatgctcttcagtgtgctgggaaggtaggaagacacccagcaggaaggtgacagaggtggctctgggggatggaaaggggctcactgggggatgactggggagggaccagccctctgtctctagtgtcaccagcctggcctctaacccagggacagagacccaagtccaggggtctcaggtggagctgcagctcccggatatggagggggaggtgtcctgtgtgtcctgggaagagaggactgtgatagagggaggtgggtggctctgggctctactgtccttggggaagacttcagggggaccctccctcccttgagctgaggctcaaggcctgtccatgttctccctgaccatcctgggtggtctctgtcctctgcgaggctgattgtcctgtggtcaccgcaccttccccacaggtggtgccaggagggaatggggagctgcacagggacccctcacagaacagggtcctcagaggacccaggaagggacagagcaggtacatgggagggcctggaagggtgttttggagcaagggatggaaagtgggctctaccttcacctccttagcaaagccaggttcatgaccaggggaatgtttcctgagtgttgtctgtgtgcaatgtctccccctggagggcaagacaaggcctgcagccttgtcaagggctgccccagggatgctgaccagggtctacatgatgtgagctggccctgacccctgggcagatgtgggctctgacctccaggcttcaaggtcaagtcaccccaggtcctgttcactgcgggtccccaggctgcccagctccatgcggtgcaggatgagcccagggagaggacgtgagttgtccagaggacttctgtcaagattggagagaactgtccaccagggggatgggctgccttagaaggagccatctgtcccagaggtttgaaaaacaaaagcaaaaacaaaacaaaacaaaaaaacaaaggcccagtgaggtgcctttgggggcttgagaatgaaatcctgtcacatgtggcaacatgaatggaagtgggctaggaacagaaagttaaacatcacatgttcttactaatatgtggaacctaaaaacagttgatctcatggaaggaaaaagtagaacagagcataccagaggctgggaagggtagaggaagggagggacagggaaagatgtgttaaaggatataaaattacagctagataggccgggcacagtggctcatgcctgtaatcccagcactttgggaggccgaggcgggtggatcatgaggtcaagagattgagaccatcctggccaacatggtgaaaccccgtctctactaaaaatacaaaaaattagccaggtgtggtcgtgggcacctgtagtcccagctacttggaggctgaggcaggagaatcactggaacccgggaggcagaggttgcaatgagccaagattgcaccattgcacttcagtgtggcgacagagtgagactccatcttaaaaaaaaataaggccaggcgcggtggctcacgcctgtaatcccagcactttgggaggccgaggcgggtggatcatgaggtcaggagatcgagaccatcctggctaacaaggtgaaaccccgtctctactaaaaatacaaaaaattagccgggcgcggtggcgggcgcctgtagtcccagctactcgggaggctgaggcaggagaatggcgtgaacctgggaagcggagcttgcagtgagccgagattgcgccactgcagtccgcagtccggcctgggcgacagagcgagactccgtctcaaaaaaaaaaaaaaaaaaaaatacagctagataggaggaggaataagttctaatgttctataccactgtaggatgactacagatttttttttttttttgagacagggtctggagtacactgcagcctcaacctcctgcgatcaggtgatcttcctgcctcagtctcccatgtagctggaactataggtgcacgccaccacgcctggctaattttttgttttatttttcaatttttttttaaataaagagacagggtatcactatgttgcccaggctggccttgaactcctaagctcaagtgatcctccgcctaggcctcccaaagttctaggattacagccaccatgcccagccaagtgttttgatttttttgtagagactgatcttattatgttggtcaggctggtctcgagctcctgggctcaagcaatcctcccgtctcggccttccaaagtgctaagattataggtgtgacccactgcaaccggcctgactatagttaacaataatatatagttccaagtagctagaaaggggatattgaatgttcctaacacaaagaaatgctaaatgtttgagatgatggatatgctaatcaccctgaccttatcactgtaccttatatgtatcacatcgctatggacccataaatatgtacaattattaggtgtcaattaaaaaatacaattaaaaaagtcatttagagctaaatcatgatgtgaaatgttgttttcttacctctcatctcatgacaacacttggcaatggcaaaacatcctcaggagttgtggctgtgtgctttactgcacagaccagtttgtttgtgagaatgtgtcacctaatgcgagtgaacctacatgagatcatcacccttcctgggggacctcagagaagaactgagaaccgctggctcaggtgtgtggaggaggttgcaggtgagtcacttgctggaaggaaggtctgtgggccagcttgaggaggaatccatttgtagaggccactggatggggccacctgggcctgggtgaagagggcctgagggcacaggacagggggagagagaaggtggtgcacatcgtcatgcaggcaagtgctttaagtgtctcttcattcattcatggcaggcaactcacactttaacatagcaactcagcaaataaaatgaggatattgactgggcgcggtggctcatgcctgtaatcccagcactttgggaggctgaggtgggtggatcacctgaggtcaggagttcaagaccagcctggccaacatggtgaaaccccgtctctactaaaaatacaaagattagctgggcgtggtggtggacacctgtaatcccatctactctggaggctgaggcaggagaatcgcttgaacccaggaggcggaggttgcagtgaaccaagactgcgccattgcattccagcctgggtgactagagcgaaactctgtcttaaaaaaaagaaaaaaaaatattttttctacttagttcaagttcctaaaaaggtctccagattgccagatttccctggaagcaggtcagggaatggtccccattaagaactattgaaatacattaacaaaaaataaagacagatagaatagctgaaacagtcttgaaaaagaaaactggaggactcacatttctttctttcttctttttttttttgagatggagtttcactcttgttgcccaggctggagtgcaatggcacgatctcagctcaccgcaacctccgcctcccgggttcaagcggttctcctgcctcagctcccgagtagctggaattacagacatgcaccaacatgcccggctaattttttgtatttttagtagagacggggtttcttcatgttagtcaggctgatctcgaactcccgacctcaggtgatctgcctgcctcagcctcccaaagttctgggattacaggcgtgagccaccgcgcctggccaggactcacatttccttatccgaaaacttactatatggtgggtacagtgtgccttgctccagtgacgaatgcactgaaggccttgactttaccacaatgcaatatatcagaatagcaaaattggacttgtaccctatgattatgcacattttttaaaaaagaaaatttactacaaagttactgtaatctgaagagtgtggaactggcataaagatacacttacaccagtggattagatttgacagtctggaagtaaaccctcacatttacagtcagttgatctttgacaagggtgctgtggttttttaggtgtcaatttgcctggattaagagacaccctcatagctggtaaagccttgtatctgggtatgactgtcagggtgtttcccgaagagactggcattggagtcagtgaactcagtaaggaagacctgccctcactcactgtgggtgggcaccatccacttggctgagggcctggatagagcacaaaggcagagggatggtgaattctctctttctctctcctggagctgggacacccttttccttttgtctttggacattagaactccaggttgtttggcctttggccatggactgagggtacaccatggcttctttggtcagaactgagccatgctgccagcttccctggttttccagcatgtaactggctaatcatgggacttctcagcctccgtattcacacaagccaattcctctaacaaatcccctcatatatttagatctatttctatatctacaactatatctttatcccgttttctctgtctctctgaggaccccgactagtacaggtgccaagttaattgaatggaggaagaataatcttttcaaataatgatgctgggacaactggataaccacctgcaaagaaatgaaattttggaactctatttctcaccatattcaaaaattaaaacagatcaatgagttaagtataagagctaaaatcataagaaactctcagaagaaaacataaggataagtctttatcacctcagatgtggcaatggactttttagatatgacacaaaaacatgaacaacaaaaggaaaaataaactggactttatcaagatgaaagccttttgtgcatcaaaggacattatcaagaaagtgaaaagatcacccaccgaatgggagaaaaaatttgcagaccattatatgaataaggttttatgtccagaaaatataaagaactgctacaactcaataataacaaaaacccaaaaacctgattaaaaatgggcaaaggggctggatgcggtggctcacgcctgtaatcccagcactttgggaggctgaggcgggcagatcacgaggtcaggagttcaagaccatcctggcttacacggtgaaaccctgtctctactaaaaatacaaaaaattagccgggcgtggtggcaggcgcctgtagtcccagctatttgggaggctgaggcaagagaatggggtgaacccaggaggcggagcttgcagtgagccaagattgtgccactgcactccagcctgggcaacagagtgagactcgatctcaacaacaacaacaaaaatgggcaaaggactcagatggatatttgtctaaatgatatacaaatagtcaataagcacatgaaaagacacttagcatcaatagtcactagtgaaatgcaaatcaaaaccacagtaagacaccacatcacacctataacaattgctacaattcatttaaaatgttaaataagaaatgttggcaatatgtggagaagttggaatcctcatacattgctggtgggaatataaaatggcacagtcactgtgggaaacggtttggcttttccttaaaaagctgatcacagaattatcatatgaaatagcaatttcattgttaggtatatgtccaaagaattgaaaacagggactcaaacagatatttgcatgggaatgttcactgcagcattattcacaataggtaaagtgtagaaacaacccaagtgtccatcaacacatgaatggataaacaaatatggtgatacatacaacagaatgtcaatcagccttaaaatggagtgaagctctgacatatgctgcaacatagatggaccttggaaacattatgctaagtgaaataagccagaaacaaagtgacatatgtgtatgatgccatttatatgaaaaatcaagaataagtaaattcagagacagaaagtagattagagattatcaagatctgggggtagggagcaatggggaattatttttttttaatctttaatttttgtggttacatagtaggtgtatatatatatatatgaggtacatgagacattttagtacaggcatgcactgtataataataatatcatggaaaattgggtatccatcccctcaagcatttatcctttgtgttacaaacaatccaattgcattcttttagttactttaaaatgtataattaaattattgttgactataatccccttgtgctattgaatagtaggtcttattcattctttctatttttttatatccattaactatatacccacctctcccctgtcccgccactacccttcctagtttctgggaaccatccttctcttctttatctccatgagttcaattgttttgatttttagatcccacaaataagtgagaacatgtgatgtttttcttcctgttcctggtttcacttaatatgatgacccttagctccatccatatcgttgcaaatgatagaatctcattttttaatggctgaataatactctattgtgtataagtgccaccttttcttcattcattcatctgttgatggacacttaggttacgtccaaatcttggctgttgtgaacagctctgcaacaaacatgggagtacagatatctctttgatatactgattttctttcttttgggtatatacccagcagtaggattgctggattgtatggtagttctatttttagttttatgaagaatctccaaacagttcttcattgtggttgtactaatttacattcccaccaacagtgtacaagggttccctttactccatatccttgctagcatttttaattgcctgtcttttgaataaaagctattttaactggggcaagataatatctcattgtagttttgatttgcatttctctgatgatcaatgatgttcagcaccttttcatatgcctgtgtgttattcgtatgttttcttttgagaaagtctgttcagatattttgcccttcttttaattggattattagatttttttccatagagttgtttgagctccttatatattctcattattagcatttctcgttctttaagatgcatcgttaggttttaggttatttatttgaagttcttctctttcttttttgatgtaggcacttagggctataaatttccatcttggtactgctttcattgtatcccacaggttttggtatgttgtgttttcattatcatttgttttgagaaattttccaatttccttcttaatttctttgttgacccactggccgtttaggagtatatcgtttaatttccatgtgtttgtatagtttccaaaatacctcttgtttttgatttctagttttattccattgtagtcagggaagatacttgatattacttcaatttttttgaatgttttaagacttgttttgtgacctaatatatagcctatttttgagaatgatccatgtactgaggagaagaatgtgtattttgcagccattgaatgaaatgttctatagttccatttgttctatagttcagattaagtctgatgtttctttgttgattttctgtctgggagatctgtctaatgctgaaagtgaggcgttgaagtctccagctattatggtattggggtctatttctctaatatttgatttatatatttgggtgctccagttttgggtgcatatatgtttacaattgttatatcctcttgctgaattgacccttttatcattgtataatgacctcctttgtcccttctaacagtttttgtctttcagtctattttgtctgatataagtatagctactcctactctcttattggtttccgttggcatggaatatctttttccatccctttaatttcagtctatgtgtatctttatggttgaaatgtgtttcttgcaggcaacagataattgggtcttatttttcagccgttcagccatactgtatctttttttggagaatttagtccatttacattcaatgttattactgataagtagggacttactcctgtcattttgttatttgtttttctgtttttatttattgcagtcttctctttcttctttccttccttcctgtcttccttttagtgaaggtgatttcctctggtggtatactttaatttctagctttttattttttgtgcgtctgttgtatggtttttgatttgtggttactatgaggcttgcaaatactatcttaaaaccattattttaaactgatgacaacttaacactgattacataaacaaacaaacatgcaaaaagaaaactaataaaagctctacacttcaacttcgtcaccccactttttaatgttttgttgtttctgtttatgtcgtattgtactgtctgtgtcctgaaaagttaatgtagtcgtgatttttgattggttcatcatttagtctttctacataagagaagtttatacaccacaattacagtgttatactattctgtgtgcttaactattaccagtgagttttgtacctttacgtgatttcttcttcatcattaacatcctttcctttcaggttaaaggattaaatttagcatttctcataggacaggtctggtgttgatgaaatccctcagcttttgcttgggaaggtctttatttctccttcgtgtttgaaggatatttttgcctgatatactattctagggtaaaagttgttttccttcagcactttaaatatgccatacactctctcctggcctgtaaggtttccactgaaaagtctgctgccagatgtattggagctccattgtatgttgtttcttttctcttgctgcttttaggatcctttgatctttgatcttagggagtttgattgttaaacgccttgaggtagtcttctttgtgttaaatctgcttggtgttctataaccttcttgtatttgaatgttgatatctttctctagggttgggaagttctcttatattattcctttgaataaaccttatgtgcctatctttttctctacctcctctttaaggccaataactttttttttttttttcctggagatggagtcttgctctgtcaccaggctggagtgcagtggcacagtctcagctcactgcaagctccgcctcccaggttcacgccattctcctgcctcagcctcctgagtagctgggactacaggcacctgccaccacgcctggctaatttttttgtattttttaatagagacggggtttcaccgtattagccaggatggtctccatctcctgacctcgtgatccacccgcctaggcctcccaaagtgctgggattacaggcgtgagccaccgtgcctggcctaaggccaataactcttagatttgccattttgagcctattttctagatcttatagatatgcttcttttttttttttttttgtctcctctgtgttttcaaatagcctgtcttcaagctcacaaattcttctgcttgatcaattctgctattaagagactctgttgcattcttcaacatgtcaattgcatttttcaactctagaatttctgcttgaatctttttaattattttaatctctttgttaacattttaattttatttattttatagagacaaggtctcattctgttgcccaggctggtctcaaactcctgagttgaagtgatcctctggcctctgtctcccaaagtgttaggattacagacacgagccactgtgcccagcctctttgttaaatttatctgataggattctgaattccttctctgtgtcgtcttgaatttgagtttcctcaaaacaattattttgaattctctgtctgaaaggtcacatatttctctttctccaggattggttcctggtgtcttatttagcttgtttagtgaggtcgtgttttcatggatggtgttgatgcttataggtgtttgttggtgtctggtcactgaaaagttaggtatttattgtagtcttcatgtcatagtctgggcttgtttatgcctgtctttcttgggaaggctttccaggtatttgaaggcacttgggtcccaagcccaagaatgctgtggtttttgcagacttacataggtactgccttggcgatcttggataagatctggaagaattatctggattaccaggtagagactcttgttcttttcccttaatttgtttcaaacaaatggaatctctccgtttgtgcagagccacctggaactgggagtgtggtgatgcaagcactctgtggccaccaccactgggattgtgctgggtcagacctaagcaccgcactgggtcttgcccaaggcccttcccttgagggtggtgaggtctcccaagcctcagatgtgtctagaaatgctgtctgggaggcagggattggagtcaaaaactgtggctgattagccaggcatggttgtgggtgcctgtaatcccagctactcaggaagctgaggcaggagaatcgcttgaacctgggaggcagaggttgcagtgatcagagatcatgccattgcactccagcctaggcgacaagaatgagactccattgcaacaaacaaatgaataaacaaactgtggctaatctggcactcaaacaatgcaaagtccttcctgctcttccttcccctttctccagcaccaccactgttccacaggggattccacccgtcctctgctgatgttcacttaaagcccaggggttcttccatcagcttgtggtgaatgctgccaggcctgggactcactcttcagggcagtgggctcccctctggcccagggaaggtccagaaatgttctccaggaacataggcctggactcggggaccccaagagactgctggttactctatcccactgtggctgagctggtacctgaggcacaagacaaagtcccctttactttttcctctatttttctcaagtagaaggagtctctccccatggctaccacagctgggaatgcactgggtcacccctgaagccagcatgtctcagagcccaaggcccactgcatattacctgggtatcactactggttattcagggcccaggggctctttagtcagcaggtgatgagttctgccaggattgggtcctttccttcaaggcagtgggctcccttttggctcacggtgtgtctagagatgtcatctgggagctagggcctagaataagggcctcatgactctgcccagttccctgtcctgctgtggctgagctggtatccaagatgcaagacaaaatcctctttactcttctctcttctctccttaagcagaaggagggagtcactttcgttgcctctagctgcgttgcctgaggttgggggaggggtggtgaaagcattcccttagccatgccagctggtgtctcccttggttacacgccactctagtccactggctttaagcccagcctaactaggagttgccttttaagtttacctaggactccagagcacatcagcccaccgtggggaggcttgctgaaaaactgaagttccgactgctgggatgggtgatacctgtctggctagggctggtccaagtactgcctctctgtgtgggcactggctgagcccagcatgcctttattctttgctgtgatggggcagcactgaattcaatgtaaggtcctccagtggccgcactcacccttcccaaagtgcagattctctctccatgttgcagggctgctgcgggttggtgggggatgggtgaggggtggtgtggcctctctccggccctcttcagtgccttttttctttctttttgtaagacagagccttgctctgtcgcccaggctggagtgtagtggtgcaatctcagcttactgcagcctctgcctcctgggttcaagtgattctgatgcctcagcctctcgagtagctgggattatgaaagtgcgccaccacacctggctaatttttgtattttttttttttttttttttttgaggcggagtctcactctgttgcccaggctggagtgcagtggtgcaatctcggctcactacaacctccgcctcctgggttcaagcgattcttctgcctcagcctcccgagtagctgggactacagccacgtgccaccatgcccggctaatttttgtatttttaatagagatggggtttcaccatgttgcccagggtggtctcaaattcctgaccttgtgatccacccgcctcagccttccaaagtgctgggattacaggtgtgagccactgcgcccggcctaatttttgtatttttagtagagatggggtctatgtagcccaggctggtctcatgctcctgacctcaagtgatccacctgccttggcctcccacagtgctgggattacaggcatgagccactgcacctggcccaatgcctctttcagcgatatgaagttaaaaccaggtactgtgattgctcccctggttttggttcttgtgacagtgcttttctctgtgcagattaaaatgtagtgttccagtggtgtgggggtgaggggacaaatggtgtaggcgtctattctactgtctggctgtttggggtgatgaaaattttctggaaaaattagtgatgatggtggtttaacattgtgaatatagttaattccacttgtgtatttagagacagggtctcaccatgttgcccagactagactccaactcctggcctcaagcaatcctccctcctcagcctcctgagtagctggggctacaggagccctccatcagggctctgtagtaaattccatttaattgtacagtttaaaatggttaaaagatacattttttgatatgtatattttattacagttttaaataagtatttggtgaaaaaaaccccaccatataaaatacccaccctgggcaaatagtcctcaaactcatgtgcggacccctcatgacattctgtgcagagatccaatgatttagacatgagactgaccagacaactgcagatgcatgaaataaatgtactttcaaagagacagttccgctgggacctgtgggccccgcagaggggaggtcagcagccccctggaaaggccctaggctggggccctctggtggacagtgaggaaattgtagacgaaaaggtcatgccaaactggtttgtttaaaaaaaatcatcgtttgtttttaatgtgtctagacaaaatttcaacactgtcatgttccatatattttctttcgcagtgttctttgattctagctcttctctggtgtgtgtgtgtgtgttttttttttttttgagacggagtctcgctgtcgcccaggttgcagtgtagtggcgcgatctcggctcactgcaggctccgccccccggggttcacgccattctcctgcctcagcctcccgagtagtagctgggactacaggcgcccgccacctcacccggctaattttttgtatttttagtagagacggggtttcaccgtgttagccagcatggtctcgatctcctgacctcgtgatccgcccgcctcggccacccaaagtgctgggattacaggcgtgagccaccgcgcccagcctctctggtgttttaaaacaagcttacactaaactcagatgttcaaagtctgatgccctgccactttcttacttcagtgcatgtttctttttcgagacggagtctcgctctgtcgcccaggctggagtgcagtggttctatctcggctcctgcaacctccgcctcctgggttccagcgattttcctgcctcagcctcctgagtagctgggattacaggtgggtgccaccacacccagctaatttttgtatttttagtagagatggggtttcaccatgttagccagggtggtctcgaactcaggtgatccacctgtctccacctcccaaagttctgggattataggcgtgagccactgcgcccggcctcagtgcacgtttcttataattccttttaaaatctgaccattgtcatgggcatgcatcaagtctgtgaatgcagacctctgggatatgcccagtgggaatactggggactcagggaatagttatcacccaaggtaggatggcatgaggcagtatcaagggacacctgcaggggggtgggggttgtgtcccacagatggtgggagccacagatggtttcatcaggacagaggcacaataaccgcatcttgatggtctcagggcttagactcacctgttgcgtccagaaccaggcattgaccagggttcaaattagtgctccacctgcagagccctgggcagagatggacaacagcctccccctgcaggacagtcagtgcagggctgggtcacctcagcactccacaggcctttgcctgcagtgttctcctggccagggaggaggccaggcccatccctgtcacatcatctaaggggctgtctgccctgagggtctgcagaagagttgaacagagtaaggggcataggaagcagtagagccgtgtctcttcttgagctgtgttaacttttgtcttcttagtccctgaggtcactcccaaatgtgggcatctagacctgaggcaggagggtaggacggggccagcttcttggcatgtgacctgtgttatcacatgggggcctgtgcttagaagggtcctgcacttaatatagtgcccttctgtggctgtgttgaaaccctcttaatcctgtcttgaagaaggatactgcattttcaggttgcactgaatcccccacattatgtggctcttcctgggtcaggagcagggagagggagaggccatgagatgagggggaggctcagggctggatgggacccatgtcccctagggctctgtgctgcccttgtcttaggacctgcagggcggtttggtctcatctgttcactcccagtgtccactgaatggtgcttgtatagcagggactgtcccactatccaggacaagcctatagtgtgtgtgctcactcagtatgtgtgtcaggctggacagaacctcactttatccctgtctgctgtgggatctgcagcaaggatcccctcctgggagtctcggtgtctctgtacctgagtggtgggatgaggagacctcaaagggccatctcagaggggactcaacagtgttggggctggaggaggcctgggctctggggcccgaggatgtcacacacctcttgagtcttttgaaatggtttcatctgttattttgaaaatcatataggtggctgggcatagtggctcacgcctgtaatcccagcactttgggaggccgaggcgggtggatcatgaggtcaggagattgagaccatcctggttaacatggtgaaaccccatctctattaaaattacaaaaaattagccaggtatggtggcaggcgcctgtagtcccagctactcaggaggctgaggcaggagaatggcgtgaactccggaggtggagcttgcagtgagctgagatcacaccactgcactccagcctgggcaacagagggagactccatctcaaaaaaaaacaaaaaacaaacaaaaaaaaaacggtcacataagaaagcacacttattgtaaattccagcaatataagcgcttgtaaaatgatgtgtcagatccctgaccccaccccactccaattccatttccaggatgtaaccactgtttgcagttggtatgaatctttcaataatactttctcatttgtcccactcattgtttatacagccaaacattaatgaattatattattaattggtaatgttgttttatagtgaagcatgtatggtggacacttcctttctcaacacatgtggatttgctccaattgtgtttctttttctgttttagaggttttattttaggttcaggggtacatgtacaggtttattatatacataaactgcatgtcacaggggtttggtgtacagatgattttgttacccaggtattaagcctagtacccaacaggtgttttgtctgatcctctccctcctcccaccctccaccctcaagtaggccccagtgtttgttcttctctttgtgtccatgggttccaatcatttaggtcccacttaaaagtgagaacatgcggctgggcatggtggcttacgcctgtaatcccagcactttgggaggctggggggggggcggggggtggatcacgaggtcaggagttcgagaccagcctgcccagtatggtgaaaccccgtctctactaaaaatgcaaaaatgagaacatgtgatatttggttttctgttcctctgttagtttgctaaggataatggcctccagctccatccatgtttctgcaaaggaaatgacctcattcttttttgtagctgtgtagtattccatggtgtgtacgtaccacattttctttatccagtctaccattgatggacatttatgttgattccatgtctttgctattgtgaatggtgctgcaatgaacattcgtgtgcatgtgtccttatggtagaatgatttatattcctctgggtgtatacccagtaatggggttgcagggtcaaatggtacttttgtttttagctctttgaggaattgccatactgcttttcacaatcgctaaactaatttacattctcaccaacagtgtataaacgttccattttctctctctcttttttcttttttagacagtcttgctttgttgcccaggctggagtgtagtggcacagcctcagctctctgcaaactccacctcctgggttcaagtgattcttgtgcctcagcctcctaagtagctgggactacaggcgtgcaccaccacgcctggctaatttttgtattcttagtagagtcgaggtttcatcctgttgggcaggctgctcttgaactcctggcctcaagtggtcctccctccttggcttcccaaattgctgggattacaggtgtaagccaccgtgcccagcacattcctttttctctgcaacttcagcagcatctgttattttttgactttttaataatagccactctggtgtgaaacggtatcttactgtggttttgatttgcatttctctaataattagtgatgttgagcattttttcatatgcatgttggtccatatgttcaagcttttgaaaagcatctgttgatgttctttgccttttcattgctttccccttatttattttattgcatggctacactgtgatgctttatccactcgcctattggatttgacgctgtgtcccactcttcatgttgacaagacattctgcagtgactatcctcatacacatatcttttccccacgtggagtattaatccaggaactcattcattcagctcttataaagtaccctggccaggctgtgggcaggtcaagggctttaacagagacagggcaggcacagtcctgccttctcagagctcaccgctcagtgggactctcagaagtgggatagtggtcaaagcgtatgcacactgaacacaatgaggccagggctgggtgtgatggctgagttcaaacctgcaattccagagctttgggaggccaaggcaggaggttgcttgaagctaggagttgaaggctgcagtgagctatgatcatgccactgtactcctgcctaggcaacagagcgagactccatctcaaaaacctccacaagacctaaaaaatcatgggccaaagttgttgttgtaagtactgcagtcccatcaggaatatatgaaaatgtccatctccagtatccccacctttcttggaataatgattgaagtagaaagtgcccgtgttcttgtgcctacctctgcccacacaccgtcttcacttacacttagtcatccaccacttaccctttcactaagtgctattgattatgtccatgtggtggaccagatgccaggagccccaagatgtcctgagcagctccctctgctcgtccttccaagagttctggttccacaggtgacccctgtagaacctgtgattaccactgaaggctgacagtgagtggtgggtgttccaggaggggccgtcacctccatgtacagggttggggagggtggaagggagcaagtggctgatggctttggctgtaaggcaggtggacaggctgatgtgggctcctgggaagggatggagaggggaggggaggggaggggaggagagggaaggggagggaagagaagggaatgatacagaggttggaacctgccttcatggaccaagaacagcagggaggccatccaggctgcagctggggagggaagatgtggggagtagtgggtgaagggagaagcagactgtgattgatcttgggggctgggcggtgagcagaggtgtgttacgtgtctgtccctgccattgatatgaggaggggtggggctgtgggtgacacctgggtcagtgggatttcctagtgtctgctgttccccaaagcctctccatatagagggtcagtatagatctgatgctgtgtctgggggaaggggctggtggtccgaggcagcctgtggtgcttactgaccctagggatgaaaggaaagggatgaggaagcctctttacagtgaagcctcaggtatgtgaagccacaggtgtctcacctggtgactgtcatcagacatgtgccttgggtgacagtttcagggttcaggtggttgttattgttatgatgtttgcctgacaaggacccaggtatccagggatcgagagcacaagacccctggtgaggggagggtcagatgagaatgagcaggttcaagtggtcagagtgggagggattcctggagagactgaacctcaactcttcctgtcaggagctgtggctgtgtccaggagagatgacaagggtgacccaggacattgagtgagtcatcgagacattggatatgaggacagggcagagaggaccctggtgactgctcagatgtgggatgtgaggagggctctgactcatgcaagttacaggatcccccaacccctgagcccacaggtgacccttacactggggattctgagtgctgtgtgtgcccagaagggacactggattggctggacctgagtccctgaagggcagggatggtctgtagggccagagtcttctctgtgggtgtgatgtaagcaggaatgagcaagatgggggtgataaggcttggcttggaggagctggtagaggagcccaggggcttgggtcagctccgcttcccaggggctcagctggggctggaggagcaggatgctgtgctcagggtgtgctccaggcagggtgatgtgtgtggttccagggtcaggcaagagggtaaaaaattaatcatgaaaaattcccaccttttgtaggcagagacagtggcctgagtgtcaggggcagaaagatgcatcatgaggcaggagcaggcactcagcctcccagagaccacaccctgggtgcagcactcagccctgcagggagtggcaacagatgtgcctacaaccctaacgtccaggcacctgcaacaaatgtttctccctcattgcatctttctcatgtggaatagaatgggcagtgatatggtttggctgtgtccccacccaaatctcatcttgaattgtaattcccgtaatccctacatgttgtgggagggacctggtgagaggtaattgaatcatgggagtcgttcccccatgctagtctaatgatagtaagttctcatgagatctgatggttttataaagagcctccccctttggttggctctcattcttctcattgatgctgccatttgaaggacatgtttgcttccccttctgccatgactgtaagtttcctgaggccttcccagccatgctgaaggtgagtcaattaaacctatttcctttttagattacccagtctccagcagttctttatagcagcttcggaacggactaatacaggcagcttttcccgcagtctctttccatccatgtgctgcctgctgtgatgcctgggaatggggggggggggggggcgggcactgagtcactgtccagggtgctgatgtccatgaactgttgaagagctaatgagttgtgatctcccagttacttctgctttcatttattcttaacaactgagcatgtcaccaaggaaaagatagagaggtactaggggcatggagagccctctgtctctctctctcaggacctggagggtgctggggacatcactacagtcaggatgacctcatccaggtacccatgtatagtttgtagtgaatgatgatgagaaaatggccttgagaggagtgatgggcagaacaagaacctctcaaagatgtgctcatcctcatccccatatctgtgaataagtctcatggtaaaagacactttacagattaaaggaaagatcatgagatggggagtgataaggcttggctgtgtccccacccaaatctcatcttgaattcctatgtattgtgggaggggcctggcgggaggtaattgaatcatgggggcaagtctttcccatgctgttcttgtgatagtgagtgggtctcagaagatctgataggtttataagggggagtttccctgtacaaactctctttttgcctgctgccatccatgtaagacatgacttgctcctccttcccttctgccatgattttgaggcctccccagccatgtggaactgtaagtccattaaacctctttcttttgtaaattgcccagtctcaggtatgtctttatcagcagcatgaaaacagactaatatagtaaattggtaccaatagagtggggtgctgctgaaaagataccccaaaatgtggaagcaactttggaactgggtaacaggcaggggttggaacagtttggaggggtcagaaaaagacaggaaaatatgggaaagtttggaacctcctagagacttgttgaatagctttgcccaaaatgccgatagcaatatggacaataaagtccagactgaggtggtctcagatggaagtgaggaacttgttaggaactggagcaaaggtgactcttgttttgttttagcaaagagactggtggcattttgccccagccctagagatttgtggaactttgagcttgtaagagatgatttagggtatctgggggaagaaatttctttttctttttttttttttttttttgagacagagtttcactcttattgcctaggctggcatgcaatggtacgatcttggctcactgcaacctccgcctcctgggttcaagtgattctcctgcctcagcctcccgagtagctgggattacaggcatgcaccaccacacctggctaattttgtatttttagtagagatggggtttctccatgttggtcaggctggtcttgaactcctaaccttaggtgatctggccacctcggccacccaaagtgttgggattacaggcatgagccaccacacccagccttctggtggaagaaatttctaagcagtgaagcattcaagaaatgacttgggtgctgttaaaggcattcagttttataagggaagtggagcataaacatttggaaaatttgcagcctgacaatgcagtagaaaagaaaatcccattttctgaggagaaattcaagctggctgcagaaatttgcataagtaatgaggagccaaatgttaatccccaagacaatggggaaaatatcttcagggcacgtcagagttcttcacagcagcccctcccatcacaggcccagaggcttaggaggaaaaagtttcatgggttgggcccaaggtctctgtgttgtgtgcagtgtagagacttggtgccctgcatcccatctgctctagctgtggctgaaaggggccaacatagagcttgggccatgacttcagagggcgcacgccccaagccttggcagcttgcatgtggtgttgagcctatgggtgcacagaagtcaagaattggggtttcagaacctccgcctagatttcagaagaggtatggaaacgcctggatgctcagacaggagtttgctgcaggggcagggccctcatggagaacctcttctagggcagtgcagaagagaaatgtggggttggagcccccacacagagtccctactggggcaccacctagtggcactgcgagaagagggccaccgtcctccagatcccagaatggtatatccactgacagcttgtaccatgtgcctggaaaagctgcagacactcaatgccagcccatgaaagtagccaggagggaggctgtatcttgcaaagccacaggggcggagctgcccaagaccataggaacccccctcttgcatcagcatgacctggatgtgagacatggaatcaaaggagatcattttggagctttaagatttgactgccccactggatttcagactagcatggagcctatggcccattcgttttggccaatttctcccatttggaatggctgtatttacctaatgtgtgtgccccccttgtatctaggaagtaactaacttgcttttgattttgcaggttcataggcagaagggacttgccttgtctcggatgagactttgggctgtggacttttgagttaatgctgaaatgagttaagactttgggggactgtttggaaggcatgattggttttgaaatgtgaggacatgagatttgggaggggccagggtggaataatatggtttggctctgtccccacccaaatctcattttgaattaccacatgttgtgggaggtaattgaatcatgggggcaggtctttcccatgctgttcttgtgatggtgagtgggtcttatgagatctgatggttttataagggggagcttccctgaacaagctctctctttttgcctgctgccatccatgtaagacatgacttggtcctccaccttctgccatgattgtgaggcctccccagccatgtggaactgtaagtccattaaacctatttcttttgtaaattgcccagtctcaggtgtgtctttagcagcagcatgaaaatggactaatacagggagattattgtggtttatccaagatgtgtccaaaataaccacaaggcccctttcttataagtaagagagggaggcaggtgtgggtggagatgtggagacagaagcagaggacagagtggtttcaagatgctgcactgctgtctctgaagatggagaaaaaggacacaaccaaagatgtaggcaccctctaggaggtggaaaaggagaagaagcggactctgacctggagcttccagaaagcacacagccatgagggcgccttggttcatgtttttatgtcactcagcttgtggtaatttgtcatagcatcaacaagaaactaaaaaggtgtcacctttcctcatctgacggtgtgtgcaggtgggataaggggtcatttagagttaaatcctgatgcaaatcctgaggtaaatcaacccattaccagttgttttcttacctctcatctcatgatgaacagcctgtggcagtggcagaacacccttgggaaccatggctctgtgctttagtgcagggactggcttgtttgtcggaaggtgctgcccggtccaagtgaacctacatgagattgtcacccttccaggggccctcagggaagggctgagaaccgctggcccaggtgtgtggaggagctgcaggtgaggcagggctggaggggccaggtagaggagcagacaggttgtcctgtcaccatgggagcctgcatgagctttaggttggggagccctgctcctctgacctggatgctcctgtgtggaaaggaggcttgctcaatgagatccacgccagggggtaaattgggaactgatgggaaatgaggggctagagtcctgggtaatgccttggaggaccttgctcgaggactgaatttttggtctgtccccaccttgattactctgacagcccctctctgtgtcccaccaggggtaaaaatgtcctgagcagtggccactgggacagaggagaacctggtggccagggctaagcatccaggatcctggatttggggacaggcaaactcacttgtggaggacagtgatagacagggccgccagggcctgggtgaagagggcaggagggctcaggacactggaggctgtgtgggggtcacagccacgatctataccacccatgtatgctcctgcattgctcacctttgtgtggacatcagatggccccatcttccacgctcctgagaccccacatgcattcacagaggaacccaggctggggcagtgcatggccttggtccctggggtagtgggaagacagctgagtgcttggctggctgggcagggctcctgtgaatcctgccctttcctgtgtagggtccaccccagcctgactcccaaccccctactcctgtctcccaggaaagagagactggggttgagaaaaggtggagatattttccctgtgtgagctgggagagaatggacgtggagtttcaggtgagtttctgctaagttctcacgagcagaaaaagagccaatgagaggaaggttcccctttattcagatcctttccaggtgaccccgggtgggccacaggcccattcactttccctgcaagcccccacttcctgtggtgatgggaagcctttgtcctgacccacccagagcccagggcagtctgttgaggtctccatatattcagcagggactcccatccctccctgtccccaggccagtgtctcctcaggactcagagctggttctctggctcaggctccatgtccttccccatccccagggctgggagcttcggggacgctccaacaacccacaggagcagctcccagaggaacctaagaaaccacatctgctttgtggttgacccagcagtaaatgtttgtgtcatggtttagcaattcctgcaaaaaaaaaaaaaaaaaaaaaaaaagagaagaggccttgacccctgtggctttctgagaacagagtctggtgtctcccaggctctgggcccatccagggctgctctgatgctgaacctggctgtgctcagggggttcctgttcccaggccccttcctcatctgctcaccaccccctgttgtgtttgcagtttcctgaatctcagagctcagccaggtgtgggtgggggcagatcctgggtccccctggagcctgcgggaccagaacacctgtgacccacactcacctcatagatgggagcggctgtcctggggtcgggtagcggggcctgggcaggggagagaggggatgtcaggggacagagagggagagacatggaaggttcctgtctctgatcggccagaacttacttccctgggtctacttatggtcatttcccctcaggagtgaccagctctgcccttgagctcagcctcccagtgtggacacagcaccccgacccctgtcctggctgggcccaccctgcacccttgttaatgtgggcccctgactgattcttccagtgtccactctgcacctgctgcactccaggggtctcctcaggtgacggagggccccggggtggggtcagcacagggcatgggtggtcctggccatgtagggaggcctggatcctggccggaggcactcactttgacctgactgttctggggaaaggtgggtttgtgctatgctgtggggttgatggtccccctgccctgaacctgtactgctgggaccccagtagaaaggggctggggaggggatgggcttacagggtaggtggagttgtttgagggaccatggcctgggggacacagacaggagtcagcagctgggtgggaggagagcctgggcctctcatggaggagggcattggggtcctgaactcccagagagtcagggagacagggcatcttaccaggagagacccctctagccattttaggggccaagtgagcaagtgagtttgcagaggtgacccatgaccaagagcccacaggtcagggctgacctggccagttggggtcccctgcaatgacgttttatgagactcctccttgaagccccatggaaaggatcagaggacctcaggggtgactggcaggagtggacactgtgggccaggcctaggggttgccagccacacccaggctgaagggacactggggagctgctctctaaagtcatgctggccactggccctaggagaggtcaggcttatttgtgaggagtacaagattaaaagccaaactctggagttagaacaggggatgaagaggggaccctatttccaaagaggggcatggagatctcctttctccattggttctgtatcaggagctgagccaggtgaggggatcaaagactttacaaaggcacatctgtcctggccagaggggaaggaccctcagccagatgctgggccaggagaacattgacccagggatgcaggaaaggaactgagggcccagggaaggaaccagatcatgggggtttgcctgagaggaagggttaagtccccagagggaaagcagggccaggcacatgtgcaggacactgaggggaccaaaggtgtcttggattctcccagaactcagtgtccctgctgtggccagaccctgctctcagggccagtgatgctgaaatgggacaacagccttgtcttctctctctaccccttggcaagagacataaaggacattccaggacatgccatcctggcacccaggttctcttgtctcacagctcaggggctgcgggaactgcattagccatgggggcactgaccctacccagcctgtccaagctgttacatccttcaccgtgtgaccatgcccaggactccctctcagatcctgagcctgcaaatcccccctcacttggtggatggattcaataaacagcaggaggtaccggggttactgagcactccctcccccgctcccttcctccaggcagctgtggctttgctgtgtgagggaactaggaccacactcaggggtgagaccttaaccaggccgaattcacagaggaggaagctgttgaggaggcagcccagggtcagcagctggtgagggaggagctgtagaatgagagggaaggatctcttggggagggctcaaagagcctggccctgaatactggggggggtcttcttcctcctggcctggggtcagcctgggggtgggagggaggccaggaaaaagctgtagtaccttccagtcctgacgaggagcaggaaacatgccagggtggccaccggtgccaccccgaccagaaccctggtcacgatgccagtgaaggcccccacaggaaggcctggggcatttttttctgcagaaaggggaaggcaaaggggatgaagcccaagtctgttccagggggaaccatgaggggccttgcagggcaggggcttgttcagggaggaaggaaatgccacggagtttgagtgtggtctgttgtgctgtcctcatagctgactccctcgctctctgtggctgcaccattttctgtgtctcaggcttgaaacactgggatgcgccgactcctacgttctcccccaggagcctgcacctcgccctgctcctgtgcctttaaatcccttcttcctctcacttcatgcctcttaccgcttttttcttttctattttttgttttttgaaacggagtctcgctctatcgccagactggagtgcagttgtgtgatctcggctcactgcaacctccacttcccaggttaaagcgattcttctgcctcagccttctgagtaactgggatcacaggcgttcaccaccacccccagctaattttttgtattttaagcagagacggggtttcaccatgttggccaggatggtctcgatctcttgacctcttgatccacccacctcggcctcctaaagtgctaagattacaggtgtgagccaccgcacctggccttttcttcttttgtttttttagatggagtctcgtccaggctggagtagagtggcacgatctcagctcactgcaacctccatctcccgagttcagatggttctcctgtctcagcctccctcgtaactgggattacaggaatgtgccatcatgccaggctaatttttgtatttttagtagagacggagtttcaccatgttggccaggctggtctcaaactcctgacctcaggtgatccatctgcctcagcctcccaaagtgctgggattacaggcgtgagccacagcacccagtcttccctctgtttcttcttttccattccatgattgtcatacagagctagccctcgctgtcaactcaatgctgatgagcggggatgatgctctttgactgttttcgggggtcttccatgtgccaggcacagtgggcaccaacctacctacagctcatctcatcctcctatcaccttgagggaggggggcttcactcccatctgcagagttagaatctgagacttacagtgcctcagtaagtcaaggaaggtcacagaacttgtacatgatacaaccaaattttaaccaaggtctccttgacttagctaataacaaagctcataaaaataataatactagttgatagcactgattgagccctggctctgtgcactaccctgttaagggctttaattacattaatcttcaaataaacatcctcacaaccatcctgagatccaagtgtttgttaaaattctacagatgaggaaactgaggcctaggaggttgagtgtcttgcccaaggtcaaacacctggtatattcccggcactgactgtcaggcctctgagcccacgctaagccatcataacctgtgacctgcacgtatacatccagatggcctggagcaactgaagaaccacaaaagaagtgaaacagccaattcctgccttaactgatgacagtccaccgttgtgatttgttcctgccgcaccctaactaatcaattgaccttgtgacattcccccccggacaatgaatctcatgatctctccaccgtgcaccttgtgacccgccccctgcccacaagagataactacctttaactgtaattttccactacctacccaaatcctgtaaaactgtcccacccccatctccctttgctgactcctttttcagattcagcccacttgcacccaagtgaataaacagcctcgttgctcacacaaagcctgtttggtggtctcttcacacggacgtgcgtaacactgaccctgatagttgacacaagggatttagttccagataaaaactggtgaattctcctattgttcctcactcctcagatcagaatctccccctctgcactgtggatgcccaagatgaagggagatgaacccatgactggtctcaggtctgcagatgcctaataacaagcagcctcacacaaccccagtggaggagaggagggggctgtggctgcagacagacctcgcatgactctaatctgccacctatggactgtgttgttataggagttattaggaaattattttagggagatagagaggaaagggggtccttgggaagtttttctttttctttttttgagacggagtcttgctctgttgcccaggctggagtgcagtggcatggtctcggctcactgcaacctccgcctcccaggttcaagtgattctcctgcctcagcctccccagtagctgggattacaggcacgcaccaccatgcccggctaatttttgtgtgtttagtagagatggagtttcaccatgttgcccaggctggcctccaactcctgacctcaggtgatccacccacctcagcctcccaaagtgctgggattacaggcatgagccactgcttggccagtttttgtttcttttaaagcagttccagaaatgttgcttgtctagcagaaaagccccagctcttagagcctggctggcaagctttgatatacaaatgaaggccattagaaactgggtccacccaaacatggggattcctgccctcttcttgcccttgctcccatatgtgcctggcaacacggttgccctcacatatccccacgtgtgtagaaccatcaaggctccctgcatttgcatattaaaaggccagggtggagggccagtttcttcttgggctacgtgaatgacatggctggtcaaaccaatcccctgagccctgtgcaaatcagacaccacgtcctccggcctcctcatataactggctgttttctgctgcacttagggtttcctctctttgcttggaacccccctccgtctgtccctgtatgggggagctttttccttcttttttgcctattaaactctttgctccacatgtgtctgtgttgttttatctaaattggcacaagaccgaggatcctggtattgctccagtcatcagagccatatcagtgtgaccctagtcagtgactgtctccctgtgcctcattttcctttcaataaataagataaatgctatttggctacaaggttgtttatgaattaacctcaaaatgtttacaattacttgatctcagctctgcacagagcagctgcccagatgaacagcatgtatgtatttgaaatgcttgttccccagtgctgtaaagaaatagcacttgaacataaatttaattttctcagcaaggccatttttatattttctgtagaaagggtatactcgccagcaattttgtgacaagagtacaccgaacaaaggagacagggtcatttataatctgacgtgtctaccttactgctgtgtccggtttccactggctggaacaggatgtcacattttgtatttgtcccgattggctagcaacttagaactttttaaaagaggcaaaggcagaggagaacaaaggaaggaggaagtaacttgtggaatgctgagaaaggtaaaaaccatcttcaaataaagaagaggagcaggctatgacctaatgcttgcttggaccagtataagcatgccagggcaaatatttaggctaaattgtgggagctaagaacataaaatacatttttttttttttttttttattacagctagcagatatttaagaatgttagcacacgtctttgagtaaattttgcttctaagagaggttgctatttattcctaattagacagggaggaaagtctttgaagaggaacctctactttactttttacatatgcttatttgcctgtaagagaaagggccctgggcctgatttcaggtggagaaggagctgctgggagcatcctctatttgttcctccccctagggaccctgaacttacaagggagtcacctaagtcccccagggcaatgggctcatgccctagtaatcttgtccatctgtgctctacatgctgagtctcaggtgaatgttgaggctctgtctttgcccagatgagggcctgggggctgagccctggctagtgaccagctccaggagccactgcccttggacagctggtaaattgtggctcccggtcagcccaggaggcaacaatccagctctggcataggctcctcagggctccacaggattccacagacccctcagtccagaccctgacttagttctccagggtcttctcaaggtcatgtccatagggagggcatggggtgcttggctgagactgacctccccctgctgagtcccccccatcagactgtctttcctcagcagtgaatgcctgcagggtctggatacgggaaaggaattctgatctgttgaagtttgtctaccctgtatgtgtcctgcagtaaatgttcaaaccccaacatgggacgtaatacagaaggggacacaggcacagcccaggcctgacaatcccatgtatgtgaagtagaactgacccccaacagtcagaggctgtgggagaatcactcagtatacatggaactggccagatacttcttctttctcagggtttatctttatggcgtgtagggtgtagaatcctgtgtcctgggtgacattctgaatcagcagggatgcattggggtatattgtcccttgaatgctgtgggcaggccctgggggtagttattagagttcctattacatatcctgtaatatggtggttggcctccaccctttcccctttgtaccagttatagccaataagatcatggggcagattgtgagtgagtagaagaacctccttcccctttgtggcattggacagcatggcttcaacagtgagcatggcagtagtgggtgggttccagaaagttaaaactgaggctaaggtgggggagagaacatcagtcaatattgggacctatgtatttggatggaaagatggggccctgagttctgaggaggtctcttcaccccctagccctggagagagagagagagagagagcacgtgcacgtgcacgtgcatgcatgggtcctgctgagtcaaagtcagcagcatgacccccattccctcagcacctctgaccttggcacttccaagtttggaatcctcttccccaggagtctgcacaaacccccaccccttatcgccctcagatcctgctcacatcaggacatccttgggagacccttcccctgacacctcctctagagacccttgctcttctcttctctttctgacctttcccagctctgttccctccagggctcttgtcagcacctgacctcacattctagatctctttgggtgtctgtcttcctcccatgagagcgtgagctccgtgagggtggggacttttgtgatcttggttgcaccccagtgtctgggacaggctgcagactcctgtggatgagttcatgagtgttcccagggccctccatggcctgaggtttgtgggtaaggacagtgtttagtggccctggttctgtttttttctggagtgttaccctgacataacattttattgtcatcagttttcagaatttattgatcagtgatgattcacttgcagtatattaacagtggagattgtttctccattaacagcttcagatcattgagattttcctggtgtgacccctgtccctctctggtgtcctctcctctgaggctccaacagaagccctctgtcccccctcagagtcccatcctccccaggagatcccagtcagtctctgtgctccctcctcccacccactcccaaggagtcctcccctcacctgtgagaaggaacccctgccaggggatgcgccctctgcagggagggctgagggaagagcttgagctccaggaacgctcttgtcagggctgctgtgactgtcagctctgctgtccttcctccctgtgtgctgagcctcctcccagggcaggagcacttcccagggtcatgggtgggggtgggctctgcccaggaagcctctctgccccctcccctctcagtcctgccttcttgtccattcttcttttttccgttctgtcttcatttacattccccagactatgctttgagaagcaaggtttatttggacccctgtcccttaacaggacaaatcaccctccccagcactgatctctgctgtgtcttggccttgggtctgtcaacaccacacagagagtccctggggtccccgaacctggtttgttgtctctatgacaaagaaatccctcggtgtattcagggtcttcttagtgttcttaaatgtctgggaaggttggatttcctcccagcaaggaggtcacaaagatgtctggggtcctaggaatggacacatctggggctaaagcccaggtctaagagtcttacttgttctttctgcagcgctatgtggccctaatttcctgggagtaactgagaatgaagctgcacgttgctgtagtattatgtcatccagacctcagacatttctagatcacctttatgattttctctacagcttgttccacatttattatttacttcatactatttttctttttttgagatgggattttgctcttgttgcccaggctggagtgcaatggtgcgatctgagctcaatgcgcaacctctgcctcccaggttcaagcgattctcctgcctcagcctcccgagtagctgggattacaggcatgcgacaccatacccagctaattttttgtatttttagtagagacggggtttcactatgttggccaggctggtcttgaactcctgacttcaagtgatctgcccaccttggcctcccagagtgctgggattacagacatgagccaccgtggccagcccatactatttttttctaaataaatttagtttacaaaacatctttgtttatcagggcacagtggctcacacctgtgatcccagctactcgagtggctgaggtggaaggattgcttgaggccaggagttggagacaaaacatccttgtcttatgcagtattgtccatgaaattacagatttgatgtgtgcttaaatgtttttctaacatgcattaaaataaacacatgagtattaaaattaaaaaacagcttatttaactttcacctaaaatcagttttgggaaacgctgatacagtggcataagcatgcactttatatccagatagacctggggtcaattactggctccatcacttaactatgtcaacttggacacgtcacttggcttctgtgatccttgattccctgatttgtaaaaggaggatggtaaaatccaccttgcagagttgttgggaataagtgagctgctgtgggagccccgtgcccaggcagttgttgagtacatgatggttatcattgtggttattgctgtgggattctggttattttccagagagagtgtctatgctggaatattgggcttgtggctttctggtaatgtacatgtgtgataagttactttttcgcttgttaggacttgtggtgcatctgtcattattttcatgtcacagttttactatctatttgctctgcgattttggtcaagttgtgtaacttttctgtgcctcatttacctaatttctaaaatgtgggtaacagtaaactagtgtgagtgtgtatttcccagatctgaccactagagagcacagaagcaccagcaccttctaaccgtgggcctatcagtgccgatggcctgcaaacatcgttctcccatgaaaggaaccagggctccctggagaaatagctgattccagggctgggtcaggaaagcatagaggaacctggagctccttgtggggccagaaaataaggaactgcacgaaaaatggtggggatgtgtcaaaaggtcacagatttccaaggaactctcaatggtcaattttgggacaatatgaacaacataataaataatgatagtaatggattccagttcataaatacccatgaatccatgctgatataaataaataattgaataaattaaataaatgaggaagcagaaatagctttttcttgtagcagaattccagttaataaatgtagaaggagtggtggaaatggaaaatcactatttggctcacaacacaggaattgttatttataggcaaggatcatcatggaatatgaagaggcctggaatgaggcaggagtgagaacaggtggcgtgattttgtttccctgagaggagggaagaggcaagccatgagtcaaagccctttgatttttgtttgacagttcttctctctgtgttttcaaattatcccagcctgttgccttgtcacagagttggttgtgggctttgctactgcaggggttataaagcacgtgcaggggccagggactgtgctaggcagtggagcctgtgtgtgaattgaagggtcaggcagggcctaagcgtggtctgatgcaaaccactgatgtgacttctttcttgaaaattctaaaaataatctctgccttcaggagcctcaagtctaatgagggagatgacatccactttataaagcctagagatatgagtgcagtaatctctcaaagtggcagaagtgcatgggggactccgagttgggtggaacttgagctggcctcacagggcagggtaggatttgggttggtggagggcagagagaacggctgtgtggagcaggggtgtgttgtaggagaggcactctttggagctctttgtatggagatcattgagggtaggggctgtttgtgttcatttttgtattccctgaactcatagagcctggcactttgggagtattctataattgactgttgaatggaatgatcgtttcgtaacctgttaactgggcctgatgtgttagaaaatatgtaaaagtgcagcctgtgtattagaaaatgtgtgaaagtacagcctatgagcagaaagaaaatcttactgaaaagcgatcccacgtacacatggagcctggtgcggccgctttacttatgctgctgagttctgcatcagtccacaccgaggccaccacaggggccgggagctcctcctcagaccttcctctgggtccctcaatctctttacccccctgttctcccaggtcctgctccctgtcagttcactccatctggtttcccctccatgcacttggggtgggtatcacatcctgtgtctcatcacagggggctttgggtccctcagatccattgattaaaacacctctaaaacaaatggactttcctcttgttaacatgacaacttcttataatgcatttcaagaacattatttgtgtcaagagtctctctgatgtacagaggccctccctcccccaggaaggaggtcaggggaagttaggagaaaacagtgtcctgtctgggttgcttatttccctattctgcagtgtatttggtagacgttcaaaaatatttgttgactctgtccatgatccacatggctctcatatagtcatttattcacacacacattcagtgaggctttgagcgcctagtgtgtgcctggtatttgctagatggtggatgctgagaagatcagatgtgctgctgtctctgaggagctttcactatatagctgcacctagggtgaccgaatgcacctgccccactttacagacatggaaattaaagtgcaggcaagtcataggactagttcaatgtcacaaggtcactagcctcaaagttataggagtaaatcaagttttctgacttgctggattttctgttagtgtgcagccacctggctgctgcaggtgcagacatggtgagctccgataggagcgaggacgctcagagtgaagtgggagccctgagcaccctggattaaccaggaggacatgccgggtccagctatgactgcacagaggaccatcgggaacatttgaattctctttttcactttgagcttgaaatgaagaaaactgatcccagaaaaccaagcgtggaaggtatttcacagggcattggtgagatgggtcagaaaatcctgtgttgatgtctgtcatcatgtttgtcactgaatagtaatggtctgactttgagtgggttccatctgtagcctggagctctgtgaggcagggaccaggtgtgattcacctttgtctctccagtgacagtacacagcagactccgataagtattttttttttttttttttttgagacagagtctcactctgatgcccaggctggagtgtagtggtatgatctcggctcactgcaagctctgcctccagggttcacgccattctcctgcctcagcctcccgagtagctgggattacaggcgcctgccaccatgcctggctaatgttttttttttaatgtttttagtagagaaggggtttcaccgtgttagccaggatggtctcgatctcctgacctcgtgatccgcccgcctcggcctcccaaattgctgggattacaggcgtgagccaccacgccccgccctccgataaatatttcttacaaaataaaacagaataaaaagtagacatctgcacaggtgtgggatgactgagcagcagcagaagcaggaaaagtcagcgtccccagatcagctgatgtggcatttggcttctagataggggtgaggtgccaggacagggacgggggtcctggggctctgctgctctggggaacacccctaggatttggagtgtctgctgtggttgctgcacttcacttgaccatgggaaagtgaccagagggtgtggggcttcaggtgaccctatatgggaaatggccgagggaagattgggtgggtggtgcatgggatggtttacccgtatttgaaggtcagttgtatgaaaagatgttaaacttatttcagcctatggagagtaagatgaggattggtgagtgtgaatcagacaccttttgactcaagacaaaaaagaactgttacagtaaaggaagtttccttggaaaattacaagtttactggcagaattcaagccagggctgggtgtctgaaaatacctctcagaatgatttttaagctaacaagggcagagcttggctaggaatgtggttttccactgatatcacatattaaaaaaatgtcctttgcaatgggacattgctcaatgatgcaggctgagctctctatgacagttactttcagtcatgtgggcagctgtgattctcttatccagtccgtgacttggacttcaccaactacctctggcaggctgcccctgccagccctatcccctcttttaccccaggagttaagtgcattaactaatgatggccacaaggtggcagtgctgctgctgctgcttttttttttcttttttctttttctgagacggagtctcactctgttgcccaggctggagtgcagtagtgcgatctcggctcactgcaacctctgcctcccgggttcaagcgattctcctgcctcagtctcccgagtagccacgtagctgggattacaggtgcgtgccaccacacccagctaattttttatatttttagtaaagacagggtttcaccgtgttagccaggatgatcttgatcttctgactttgcgatccgcccgcctcggcctctcaaagtgctaggattacagatgtgagccaccgcacccggccctctctggtgttttctaaaacctctacctgaatgtgggcaagcctaagaggcttttaggattaagaaaaggtcatgaatgaggtgaaaggtaaacttcattattatttttctcttgtgaggtgacatagttgagtgtgaaatagttgcattttagaactggaagacactggagagaagtgcttcacaaatcttaatgtgttcatggatcacctgaagatcttgattaaatacagattcggattcttttggtggggcctgagattctcaatttctaaggcgcttttggatgatgtcattgctgctggttggtggaccacactttgagtagcaaggcttgagggtcatttagagattaattctcattccatgtgatttatggctgaagagagaccaaactacagagagagaatataacttgccttccataactatgccctcactgcatgactttttgcatttaaacccagggcttcagcttctccgtccaattctcgtttcatgcatcacgtggcccctacactgttgttggtggcatctctttaccttaggaacccagaactccatttccaccacccactgatcttggctcaaggtttcactttgactgggtctgcccttcctcaaaaccttgaggggctcttctataatcacaagatcaagtttgaacctcggtgtctactgttcatgcctctacaacatgtgattccccctttagcaagcttacataacttccctgtttttttaactgactctttctgctctagctctccctgctccttcctgttccctacacatacttcgttcaggtccctcaatggtagtggtggttacatggtctctggtgttagactcaccgagtttctaatcccatacccaccaccgaccttggcaagttacttcccctttctgaggatgagcatcctcctctgaaataatttcatgtattgattgagagagtaaataaaataacatctgcaagcccactgtcattcctcggaccctctttaaaactagcatctacacagggtggggaacatcacacaccggggcctgtcgtggggtggagggaagggggagggatagcactaggagagatacctaatgtaaatgacgagtaaatggggtgcagcacaccaacatggcacatgtatacatatgtaacaaacctgcacattgtgcacatggaccctggaacttaaagtataattaaaaaaaaaaaaaccaaaaccaaaaaaaactagcatctacagtggtgcctgacacctggttccctggcttatgtttctccatgtctctgctttcctaaggctgaaccattcaaggcctaacctgaaccctgtctcttttgtgagcatttgtttctttctttcttttttcttttttgttttgttttgagacggagtctcactctgtcccccaggctggagtgcagtggcgcagtctcagcccactgtaacctccgcctcctgggttcaagctattctcctgcctcagcctcctgagtagctgggattacaggtgcatgccaccatgcacagctaattttttttttttgtattttagtagagatggggtttcaccatgttggtcaggatggtctcgaactcctgacctcaagtgatctgcccgcctcagcctcccaaagtgttaggactacaggcatgaaccaccacacccggccttatgagcatttctgacccaattgatcccacccttctataaattgtttcacccatgtattggcatttaattatgtcccagtgagaccccatagggaggctggaagggtgttggctgtgtgaaaactgaaggtgaattgagtgagctcctttcttactaccccctgagtgttagagctaccatctcttttttttttcagctattgccagcagcagttcctcctgcgccagctgcaccagaccctgggcaggcaagtgaataccttagggtttgttcctgtcagggtcactcctgcctctgggttttggtgaaactggcgttttcttttgcatcttatcaggtggcccctctgaggaggttattgatgatatccctttatggaaagcctaaggtaataactctaaggaagttgagcacagtattttctaacttaaacagcttggtggcaggagatgtgtacactttcctatttcataaaatttacaacagattcagaagagattaaggacaaaggaccaaatggggaggacaggtttgtttaagggaggtcatgtactttcaatctggagtctatcaattgttcattcaactctgtgtggaagtgtgcatctttgcatgtgtggtcgtatatttggatcacatgattcataattctgtccctgtcagtggcaattaggagttcatgttaggcttatgaggataaaatatatgggtgtgcactattactgaagccagggtttctgatatctggagagaaaataggccaggagggctggtcactttacttagtgccctgcctttctctctctctctctctctttctcttttgagacagagtctcactctgacacccaggctggagtgtagtggactatagctcacttcaacctccacctcctgggctcaagtgatcctcccatatcagcctccttgttagctgggaccacaagcacatgccatcatgcccagctaattttttgttttgtttatttgtttgtctgtttttgtagagatgggttttcaccatattgctcaggttggtctcgaacttctgggctccagtgatctagccattttggcctcttccaaatgctgggattacaagtgtgagccaccattcccggccctgccttctctttttattagacagcagtctactcactcatcatgttcccagtgaggggatttttaaccttctcattttcctaccaggggtccatgccaaagtccatatgtgtttaattgtgtctagaattggatgttctttttgaaaagagcagcccaaggaatggcttcttagctgatatccaggattctaatcttcattgtctaaactttgggtttccattcctggatactggttagagtaacttgtagggcatttaaaatgtaccaatgtctgtgctttccccaagtatgtctgactggattggtgcattgtgtgcccaggcattggttgtttaagaatgcttccaaggaaaacggtcattttattgtggaggaattttagcccagggctcaaagttaacatcccattaattagagatatcgacatcttagggcatcctaatataatggatggagaaggcacaaaatcgcctctttggttttcttgaccgaagtgtataacctcagtttaatcatgagaaaaaattagaaaaatttaaactgagggtaactacaaaataacaacgccaatacttttcaaaaatgttaaggtcatgaaggcaaaagaaattctgaggaactgtcccagattaaaggagactgagaggacaaaacaatgagatgcaatgtgtaattgtacattggaccctgttccagaaaaaggacattagagggaagataaagaggatttgaataaagtctgcagattcattcactgtatgatgtcagcgataatttattgattttaatgtttgcactgtggttatctaaaacaatgtttggggaagttgagtgaaaagtatatggggactgtatttttggaacatttttgaaagtctgaaattatttcaaaatgaaaagtttgaaaaaaaaaaggagaagaaatctagatatttctattaagttgccagacttgaagaccatttcccaagttatcttgcctaatattgtagagtaatcttcctggaaatgctgtttgtcacgtttgtgagcttctcagagctttccagtgacttctcttatctgtaggatgaagttcccattccttaggatgccactcagagccctcatagcccggccccaatctactcccttgatttacattgaaggacctgacccacattttactttctcatttccaaacattttctaagtcttttccctcttcatatcacacccttgcctgtcttctcagcctcctgagttgttctttgtcctaaaggcccatttcagaccctgtctcttcattgaagcctgtatatttatttctgttagaagcagtcatctttcctttctttgaattcttgcaggtacaatggtgtggagtgaaacatgagttttatttcattatattatattttagaaaaaaatcaatttattctgctcattaaaagtttttcttttaaaaaaatcttaaaattttcattggagaaggattagagattaaattgttgatgtttgaatttcgttgtggtttaaaaaaacttttattttaggttcagggtacatgtgcaactttgttatgtaggtgaacctgtgtcacaggggtttgatgtacaaattatttcatcacccagctactaggcctaatactcagtagttatgtttcctgctcctcttcttcctcccactctccaccctcttgtaggccccaatgtctgttgttcccctttttatgtccatgtgttctcatcatttagctcccacttattttttaattttaatttaatttaattttttttttttttgagacggagtctctctctgtcacccaggctggagtgcagtggtgcgatctccgctcactgcaagctctgcctcccaggttcacgccgttctcctgcctcagcctcctgaatagctgggactacaggtgcctgccaccatgcccagctaatttttttgtatttttagtagagacggggtttcactgtgttagccaggatggtctcaatctcttgacctcatgatccacccacctcagcctcccaaagtgttgggattacaggcgtgagccactgcgcccggccttagccccacttataagtgagaacatgcagtatttgtttttctgtttctgcgttagtttgctgagcataatgtcctctagctccaccaatgttcctgcaaaagagatgatcacattattttttatggctgcatagtattctgtggtgtatatgtaccacattttaaaaatgcagttttccattgagaggcatttcggttgattctatgtcttctctattgtgaacagtgctgcagtgaacattcatgtgcatgtgtctttatgatagaatgatttatattcctctgggtatatacccagtaatgagattgctgggtcaaatggtagttctgtttttagctctttgaggaattgccatactgctttccacaatgattgaactaataattgacactcccaccaacagtgtataagcacccccttttctccacaaccttgccagcatgttacttttttttgacatttttgataatagccattctgacgggtatgagatggtatctcactgtagttttgatttgcatttctctaatgatcagtgatagtgagctttctttcctatgctgttggccacatgtatgtcttcttttgaaaagtgtctgttcgccaggcagagtggctcacacctgtaatcctagcactttgggaggctgacgtgggtggatcacttgaggtcaggagttcaaaaccagcctggtcaatatggtgaaactctttctctactaaaaatacaaaaaaattagttgggtgtggtggtgggcacctgtaatcccagctacttgggaggctgaagcaggagaatttcttgaactcgggaggcggaggttgcagtgagccgagattgcaccactgcactaaaaaaaaaaaaatgtgttcatgtcctttgcccactttttagtgggaatttttttttcttgtaaatttgtttaagttccctgtagatgctggatattacattttagtcagatgcatagtttgcaaatatgttttcccactctgtaagttgtctgtttactctgttgatagtgtcttttgctggaagcatgagttttggattcagaaatatgagtctgagtcctagttccaccttttatcaggtgagataagggacaagttaattgatgtcttggaatagagggataatagtgcctatttaaagggtcattgtgagcattggatgaggtacaaacataaaggtccccagcaggtagcagattacttcctcttcattcctgtagctcagtggttccaaaggtattgcgggtggtgtgaactttcttatcaaaattttctatagatccttcaactaagatagccttgaactgaactgaatgcttaggactttaagaagttcaactgacgtttggatttttgtgaaaacaactcagtaaataagttatctatcaatagaggaatgtaacccaacagaggaagaagggaatgacaatgggattgtaaatgggagaaagctgtgatgccttccacacccatccctttgttctcagtcagacaatatcaaggaagtacaacttctaaaattatgtaaaggaaaataaacacctcaggactgccaaactcattacaccaaagggatacttcagcctggagattgagtcatgcaagaccaccattttttccccaaatgaacaactgttactttacaaccttgtgtcaaagcattgtacattagccagagccccaggagaagatgaaaaggccctaggcatatctggatgacctccctcacaaattgtttttttgctgtcctcgaaccacatttgaagtatatttgtggaacagactcttacaagtactcttaaatgttggcttctcataactgtggagctcatgtcactggactaggaaaaaaaacccaggactttagttaaaaaaaatgcattcatgatgattgctaacccaacatcaagcagaacaagagttaattacatgaggataaattgatacaggactaaaatgattttttcatgaccttttttttaaaaaaaaacattgctgactttttttatgttttgttctccagagtcaaaaaagctttttttttttttcttttgagctttttagcttacaacaaattgggtaaagtataattttgtgagctaaatttgaaagatttatctttctctctacccaatttctacaaaaataaactatttgtgcatattcttaatttatggcaatatagatatttgcataaattccataagaatttgttttcttttataacaggacacaattggagacattggttattttatagaggctttgagtgaaatggtatattttcagatatgaccagaatgctttgaggaattgagattgactttatagaactgacaaaaagcctcttggacagactgacctggttaccttgtctatgcagtttctataaaaagttaatgatctgtggtaagtaaagaatgtcactttctgataggcccaggaacccccaagttattttgagacctcaagaaaagaggaattcaccaaattcatgcaggtatctacaggcacagataaattactggcttgcatagccttgagatgcttttggaagtctaatctgagattccttatgaaaaaaagtctcagcaaagccaatttaaaaagactctctatggccaaccactattcttgccatactttatgcaaataatcaggccaggtataagactaaaacttatttagcaaatacatttgtcctgctatgatttgtctttcataaaaatgggagcctggagagagaaaaatttgtgtttcaaaagaaaacttcaatacaactgttattaaattctaggcttgttcattatttttgagttttattatttgcctataatttggactgaatcctaaattctttcctggctataaatatcaaaagtaatgatttcaagattttcttccattttggaatgttagaaattaaaactgtgcttttcttcaagccctgcaaactgaaactagacaagttaagtgaacttttggagaagtcacagcaacttatatataaacaacttttgtgcccgttgatgcatggactacacgaaagggtcacacgaatactggatttgtactgaaattcagagaaatctgtgagattgtcactgcagttagatgattcagagactctagaaaaatgagtctataggctgggcgtggtggctcacgcctgtaatcccagcactttgggaggctgaagtgggtggatcacgaggtcaggagatcgagaccatcctggctaacacggtgaaaccccgtctctattaaaaaatacaaaaaattagctgggtgtggtggcgggagcctgtagtcccagctactcgggaggttgaggcaggagaatggcgtgaacctgggaggcggaacttgcagtgagctgagatcgcgccactgcactccagcctgggcaacagagccagactctgtctcaaaaaaaaaaaaaaaaaaaaaaaaaagaaaaagaaaaatgagtctatagactgctgtagacattagaggtgagccaacatgcaactgaaagtgttagtgatcatggcccaaagaattgctctaattgaggaggcagttgtgtatcctcagttggattccaggattatactttgttgttgttgttgttgctgtaattagtccttggtccttttctgatttgacttcacccccttttccatgggagatgacttcctaggaatgagccttcatagtgatgtaagatcagatgaaacatagccacaaagtcatgtatttaacagtaatttctctgaaagatatagaagaatgttggaggtgggcaggtgtggtggcacaggcctgtaatttcacattttgaaaggccaaggtggaaggatcgcttgaagccaggagttcaagactagcctgagcaacaaaatgagaccacatctctacaaaaaataaactaaaataaattagctgggtgcagtggtgcatgcctgtagtctcagctattcaggaggctgatgtgggaggacctcctgagcccaggagttccaggctgcagtgagctacaatcatgtcactataccctagcctgggtgacagagcaagaccttgcttcttaaaaaaaaagtgggaggcggggttggggcaacaggaaggcaaaaagcctcagggatctccagatgactgccctctaaatagttctttgctggcctcaaaatctttcaagatgtatagcgtttcataaaacaaggcatgtcaattataacttcaggtgtgcaatcaaaatctagctcctaaaactaaagcctgttaagttttattctgataatatttatcttcccaggcacagaacaaaggcaaaatgagatcaattattcttccacctatcccatctctttctacctgtcttcccccctgtaaggaaatatataaatactaagccttctgcaacctcttcagagagaacacacccacagaggttttctgtgattcatgttttcccagggtgcaccctcaagctctggctcaataaaccttaactggtcaagacccttgcctcagtcaatcattctggatgaccaccatgagtcttgcacaggccttcactgatccctttgctgcccaggtgatgtgtacctaggtgaatcaggtccccacgagtcaaacactcttctccctttctgcctcctctacctccctctcctcattcagtgccgtgtgccctggtctggccccagctccaggccattagtattagcctaagaaggcaaggccaggatgaacaggctgagaaggaaatcagaggccaacaggcatgaaaagaggcagatgggactgtcatttctcagagccacccactctgggtgtgttttatgactgctactggatttggaatcttttcctctttgtggccataatgggaactcacccttctcctacttccttcccattacactttctattcatagggaactccttttatgaccagagaaaggctgtaaaaatagttgacaattgagtaaaactgactttataatgactgggaacctggctctgtttttttccaaaagagactgagattcctcaaagctagcttttatgcagggctgtgcagttgtgagtgtagcattagggaacaggtacataagtgaagggtgagacagaaaacaaaatgctggctctttgtcaaatcctgaaagtagagggggcaaaaatcattctggaaggtgtatgtcattcaggagaccttggaaatctcagggtatcctcttcccagatgaagtggaggatgaggttaaattatggagttgggtgtgtgatactgggtacattacttctctgcctcgttttttttttgttgtttttttgttttttttgatggagtctcactctgttgcccaggctggagtgcagtggcacgatcttggctcactgcaagctctgcctccagggttcacgccattctcctgcctcagcctcccgaatagctgggactataggtgcctgccaccacgcccggctattttttttgtatttttagtagagatggggttttacgatgttggccaggatagtcttgaacttctgaccttgtgatccacctgcctcagcctcccagagttctgggattacagttgtgagccaccgtgcccagcctgcctcatttttttaatctgtaaaaatggggataacatccaggaatttttgtgaagatgttaactacatggaaagatcttaggatagttcctggcacatactgagttttaagtcagtgcaaactattatgattatgggaataggaaaaggtgccaccctggacgtgtaggatgagggggtattttctagccagggtcctagcaggccaaccggagatgaagatggttaagcagaagcagcttaacttcaggagtggaaggattggggagcagtagctcatgcacaagattctgtgaaaatgcctttacctaacagcagaaatacccagaatgggtgtggcttctgtcacaattattgtctaaaaatgtgtcgtagactcaaatggcgttgatgtaagccaagtacagaaaagggcttcagggctgccttgcacatagcattcatcttgtcaaaggaaaacattcatcttgttaaaggaaaacattcattttgctaaaggaatccccacttgtagccctggttattatttttgtctcagtactattcttgtttatagtttgtaaagagaaagactgaagaagtgtgaaatacggaagtgcatgtatgaattaacagggcagaattgggactggtatgcgtaagttaagagaaagtgcatataaatttatgtgaacataaagaggacttcttgttttaagcagacctctttgtataaaaaatgtgggctgtcttgagtggatggcagactctatcacaagaacattctagcagagtcacgagagaatggggagcatgacttctttctaaatggcaagttaagagtatgtaagtcgatgaagagagaggagatgaaggagaagatgggtgaggatgagagaaatgggatagagaaaagaacagactgaaaggaatgtttaccaagtgctcatcaggtaccagcctctgtgtctaataccttacacatcttaatttactctttgactgtcattttctgataacagtaagagtcatctttgtgctgcagatgagaaaacgctgtaggaggtgaagtgagtggtccaggatcatccagccagttcatagcagagctggtgtgtttcacctcaaagtttgtgctcttgcctgtgattcacacaaaacaatgagatatagaaagaaggcaaatgaaatttttgttgtgggtgatgtttatggaagttaccagtgttaggcagaataatggcctccccaaaatgtccacatccttatccatggaacctgtgcatgttactttatttggcaaaaagacttcactcttgagatggggaggttattctggataatctagggtggcccagtgtaatcagaagggtccttgtaagtgaaagagtgaggcaggaaggtcagggtgaaaatgctgcagtctgagactccactaaccattgctggctgtgaacatgcatcagaagacaaaatttcaactaatgtagttatagatctgattggcttttaattgtgattcagggtttggggcagctctcactctacacatacagtgatagctccccctgggcaacataataacagagcaatgggttttgtcaaattggaaccagtagacagagccatagaaataaatggattggttaacatcagggtacttcaggttactctttttggggtaaatgttaaagcagaggggacttccttatgatgttgactcagggagactggaatcttctgttttcagaaaacattggtctgttttgagatctgcttccttaaaattccagttggagtatgcagcatttagtgtgagtggctctaatttggagtctttagactctcacttaagtgagagtgtgaccaaagcttaaagcattagcattactctcagttatcatcatttttggcttccattgtttataggttatgatatcctcctgatcacacatttctttgagtttatgtagttccagccaaatagagaccatttgatatttgatggatggcagcacgcaaacacttaaaacttttagagattacagcacaccagggagaccagtagtatgactatgaggaagataatgttaagagtttggagtatgcacctttggtaagatgcaaaccaactgaaatagaatagataaaagaatgaaccagatgagtgtagccattttaaccaagtagcatgtttgttaatttttgcaactgagactctataatacccgatatatttatccatgtgcaacaagaagcatcataaactacacagactcctctctgatcagccaatagggagcaattttattatctagcattgcatgcctgggttaaattaaaacagacagtgagaacaagtgagtctaggagtctgactctaaaagagaccatagtacatttgaacaaagagttgtgttaaagatgctgttactgtcagccattgggtggactaaaggatctcatacgtaaaaatttggggttgacacgatagattagacactccgttaatctatcattctctgtattttctcaaatataacatcccaatcaaagccttggtaatataaccaatgttttaaactatatcccattataaagacagcagattctcactgaacttgtgcaaataactgaattaccataaacatatgaatactcatgaatagttgcccagttctgtggcagtcaggtagggagcaaaagtaaatgttataatttttgttcacaaaagtctgctttaccaaattgcagtaaggtatagatagcttaaaagataaagaaattcataaatctgaaaaagaaaacacttaaagaattggcaatttttcaaataaaaaatcttaaaaacgggctgggcgcggtggctcacacctgtaatcccagaactttgggaggctgaggcaggcggaccatgaagtcaggagattgagaccacagtgaaaccccgtctctactaaaaatacaaaaaattagccgggcgttgtggcaggcgcctgtagtcccagctactcaggaggctgaggcaggagaatggtgtgaacccaggaggcggagcttgcagtgagttgagatcgtgccactgcactccagcctgggcgacagagcgagattccatctcaaaaaaaaaaaaaaaaaaatcttaaaaacattatcctcattattatttagttcaatgaaattcatgtttttttccttctgtgttttggtgggcaacttcacaaaggtatcagcctgtttgcaagttcatagacagtccagtggcgtgatcttaaagttatcaggaacttgtgttcaagagtactcgtcagagtattttccataaatcttgaagaagaagcaattttgaatggtagctgattgcaaatgctttgaggaagaataaaaacaactgtctgtgaatgacaaagattgaaaatgactatggttaaaactctgaggagagctcattatgataaagacacagccacatagaaatttagttacttctgtggcatatgacattatgactgataacatattcgatttctaggaaactcataatttttggaacactcatatcggtaacataaccgtaaatataacttagagaaggtttagcaccacttatcaattgacaatgctttccatgtaatttaacatatcaagtaaggctgggcgtggtggcttatgcctgtaatcccagcactttgggaggccgaggcgggtggatcacaaggtcatgagatcgagaccagcctgaccaacatggtgaaaccccgtctctactaaaaatagaaaaattagctgggcgtggtggcaggtgcctgtaatcccagctactcgggaggctgaggcaggagaattgcttgaacctgggaagcagaggttgcagtgagccgagattgtgccactgcactccagcctggcgacggagcgagactccgtctcaaaaaaaaaaaaaaaaaaaaaaaaaaaaaaaaatatatatatatatatatatatatataaaataaggtggcttttccacttagcttctgtttctcaactggattactgagttcttggtggagcccattaatgaacagggccagcaaaatataggcttgtatatgttgaaaaagttttctaggaaattctaatactcccagctaaagaaccattgttttagcctcatgtgctacctattagaacaggagttctccatcctggttacatgttagtagcatctgggaaggcttaaaaattaccaatgcctgggtcccactccagatagtaggtaagaatttatggatggggcttgagcatcatttaaaaaaacatttctcagtgattccaatgtgtggctatatttcccatcagatttctctgatttcttgtggcattcacttttttctattttggtattatgattatttttcatatcttatctcctgtcttaggctgtatgttctctggggtagggatcttgcctttttcatttctgtatctttcatgaacacatgaattggtcatcaggaaaaggttctcaaccacacgtaggctgtgtcctgaatctcaggttcacacattaatgctagagtcgttgttctccatgaggtcagaggttgcttgctttgaagggtatgtgggcaactccacagttcagatagtggatgggagattaccctgtttctaggcatagcattggaactaagaattctatgtgtatatggggtagatgcgcagggaagtgtaggaagacagttctaattaggatggaggaattatactagggagtagagggaatggaagtgagaagaattagtaaagagaagaaatgtgaacttatcaaataggccagagtaggcctctgaagattcttgagtaagtgagtgaactagattttaggaaggtaatgagacaatcatatgcaaggaagatttcaaatactagagacaagaagtcaagcaggacttcgagcagttgttgaggtctatgggaatggataaaatgacacaagtgagagatgttaagaaaggatcaaaagactttcatagtgtattgaatctgggaaacaaatgagcagaggctgggaataatcacatctaagagacagtggggtacagggagcatgcagaccagggaagaagagacctgcaggaattagtgctgagaagcaggagtttattgggaggaggaggagatccattcccgggatacaggtctctctcccaagcatggcggtcagccctgcaggaaacaggacaagaggaaaggccatcatacctgccagtcttcttgaaatgcagaaactacaccagagctactatatcagagccaccctggccagtactccaatcatgatgctgacagtggctctagctgagaggccaggagaacttccttgtactaaagcatctgtcatggaaagaaaagaagagaaggaatgaagttgatgccattttacagtggggtaccccaggaaccagctcctagcatgaagtagtctctacttgttttttcaaggaatacattatttttgtgggaaggttgctgggacgtgattagccaactatattcttgcaggattttttcctctcaccatgtttctaggttgacgatcagtcttcggtcaatttcatcctggcatttctttactcagatattttgaaggctttgtgatgtgaaaaagctgattgctattttatgtgtcattagaactttccaccttttcatggttgcatctttttctcagtgtcttagttgtggcaggtctctatggcagggagctgattgacagaaggcccaggtcagtgcattccaaattgaccacctcctttgcacagagacctctcttcccaggggctcccagcaggggtatggaagcaagcccagttttgtgagactctgtttaactctgatgggtgactagttggaggacgccccatcagccttgcctaaactcacttagaactgcactgctatctaaaacttctttttctttctccttcacaggaatcaaatctgcatcgtggtctgagggctctcccaggctcctctcacacctgccccattttccctcacaggtgtttttcctagtaaattatcttgcgtgtctaatctcatcttggttgcatctcagtgggttaaaaactaacataccaggtttgattctttgcacttagctttttttctctctttcacgtgtaaccagtaaccatgtcctcgtgtttcctgtgttgccttttttttatatgtgtgtgtatttacctaagataccttttacacacacacacacacacacacacaaccttttgcatctgtttctttatttctattggaaccatttacttttggccctcaccagtcaactcaggctgatgattaatgctatgttagctactgttgaggggcagctcctatgggccaggccctgtgctaaatactttacctcatttgatttatacaataactctcttgggtagaacattatttccattttacagatgaaacgacagaggcttagagtggtgaaaaaactttcctgatgtcatatggctggtgagaagtagacttgagatttgattctaggactactcagcttcaagctaatgataacagtagtaatatatcagctaaaatttatgaaacatttcctctgtgtggggcattttgctgaaggtttcattgatgattacataaaactcttaaaacaatgctatgaagcaaacactgttactgcaattttcagttgaggaatcagaggctcagagaagttaagaatcttgtgcaagaaatttataactgttaagtcttacattaaaaaagaagaaacatctcaaatcaacaacctaatttgcaacttcatggtacaggagaaaaacaaactaaacccaaatatattgaatgaaggaagtaataaggattagagtggatataaatgaaatggagaatggacaaacaatagaggaaatcaatgaaaccaaaagttggttcttcaaaataagatcaacaaaattgccaaccattaactagactgactaagaaaaaaagagacaagatggaaattactaaaatcagaaatgaaaatggactcccagcatggtggcttacaccttcaatcccagcactttgggaaggcaaattgggaggattgcttgaggcctggagtttgaaaccagctggggcaacatagggagaccctgtctctacaaaattaaaacaaaaattcagctgggcatgatggtatgcacctgtagtttcagctacctgggaagctgagttgggaggattgcttgagcccaggaggttgaggctgcagtgagttttgatcgcacctctgcactccagcctgggctgacctaaggagtgagactcgtctttctctctctctcaaaaaaaaaaaaaaaacaaacaaaaaaaaaacgaaagaaagaaaagaaaatggagatattatatatcaattctagagaaatattgtttacaaaagtactatgaataattgtatgccaataaattggatagcctagatgaaatggacaaattccaagaaacacacacaaaaaatctgaatagacctataattagtaggaagattgaataaaaatttcatttgacaaaattcaacattctttcttaataaaaacatgctaagtatgaatggaaggaaactatctcaatataataaaggcagtatgtgaaaagcccaaggctaacatcatactcaatagagaaagactgaaagctttccccctatgatcaggaacaagacaaggatgcctgcttttgccacgtctatttaacatagtattacaagtcctagccagagaaattaggcaagaaaaaaagaagactttcagattggaaagaagaagtaaaattatctgtctgttcacagacaacttgaacttctttgtagaaaactctaaggatgaaaaaaacctgttagaatttattaataaattcagtaatgttgcaggatacaaaatcagcatgcaaacatcagttgcatttctatacactaacaatgaacaatctaaaaaggaaattaagaaaaaaattttaattcacattaacatcaaaaagaataaaatacttaggcataagtttaaccaaggaggtgaaaggattgtattctgaaaactagaaaacattgctgaaggaaattaaatacgacctcaaaaaatgggaagacattttgttttcatggattggaagacacggtattgttaggaggataataccacccaaagtgagctatggattcaacacaatttctatcagaattccaatgacatttttttgcagaaatagaaaaatctatcctaaagttcatatggaatttcaggactcaaaatagccaaccaatcatgaaaaaaggaaccttgaaaaaaaaatgctgaatcctgatttcagcatttactacaaagccacagtaatcaatacaatgcagtacttgcgtaaaggaagacagaaaccagcggaatagaacagaaagcccagaaaggaatgcttgcatatatggccaaatgatatttgataaggatgccaataccactcaatggggaaagtgcagtcttttcagcaaatgattttgggaaagctggaaatccatgcagaaagatgagctgaacctttacctgacaccatatacaaaaaactaacccacagtagatcaaagaccaaatgtaagagtaaaaactataaaactctcagaagaaaacacagggaaaaaaactccatgacattggatttcacagtggtttcttggttataacaacaaaagcataggcaacaaaagaaaaaatgggtaagttggacttcatgaaaatcaataacttttatatatcaaagaacattgtcgaggaagtgaaaaggcaaccttgaagtgggaaaaatatttgtaaatcatgtatgataagggatcaattttcagagtatatgaagaactactacaaatccacaacagcaaaaatccaaaaacccaactaaaaaaggacaaaagactgaaatagagatttctccaaggaagatatacaaatggccaatgagcacatgcaaagatgctcaacatcactgatacttagagatatgcaaatcagaaccccaatgatagaatacctcaaacacattaggatggctttgattaaaaaaaaaccacacacacacaaacaacaagtgtttttaaggaagtggaaaaattggagctctagtgcattgctgatggaagtgtgaaatgttatagccactgtggaaaacagtatggctgtttctcaaacaattaaacaaagaattaccattggatccagcaattccacttctggacatatatgcaagagaattggaagggatttgaacagatatttgtacactgatgttcacagcagcattagtcacacaatagccaaaaggtggaaacaactgcaaagtccattgaaagataagtggatagaaaagtgaggtgtatccatacaatggaatgttcttcaatcttaacaaggaagaaaattctgatacatggtgcaaaatggatgaaccttaaaaacattatgttaagtgaaacaagccagacacaaaaggccacctattatataattccatttatataaggttgttagaataatcaattacatagagacagaaagtagaatggaggttgccaggggttagagggagaaggagtgagagttactctttattgggcagagaagtttatttaatatggtaagatgaaaaagttctggaaatggatggtggtgatggttacataacactaaattgcacgcatagaaatagttaatggtggctgggagtggtggctcatgcctgtaatcccagcactttgagaagccaaggcgggtggatcacctgagttcgggagttcgagaccagcctgatcaacatggagaaaccccatctctactaaaaatacaaaattagctgggcgtgttggcacatgcctgtaatccagctacttgggaggctgaggcaggagaattgcttgaacccaggaggcggagggtgagccgagatagtgccattgcactccagcctgggcaactggcactaccccttccctctcatgcagagaccctgtggctgaatctccctgtgtctccaagtgtgcatcactcactgtcctctgtgttgtatccacagcctcatgcagcccgtgacttcagagctaggacactgctcaggagtcttcccggaggctccctgtcttcccatttttgtgcagcctgactggggggaggcttggcttcaactggcaacttgatttagccagatttgggataggccacctgagcaccttttccatacacctgggtcccaccccaggtggagtcagggcagggcctgtcaccagggagctgggagcagagatgggagcagtctgagctgctcctccgtcatccaaggggctcctcctcccatttggggaacgttgtgggcttgtttcaaagccttggatgtttcttgcagctaatggcataggtaaaagaaaacaaaggggtaacagaaacaggggtgccatgtgttggtgacaaagaaaagcaacttgaccttgaggaccctccttcttcccccttggtgaagtcctttccatgacatagggctctggggctgacgaaggcccctctccacgtttctcaggtcagccccgaggtcagccaagagaaatcagaaaaacaggcagaagagagtctatagagataaactgggagggtttaggagaaaagttggggatttgcttgtgctgttggacacaggctgggaataaaactttttttctggctcatctctgaaagccagatagactctaccagaaaacatactgccagtgctccagggatccacttaccagagactgtgatcatcctgactgtggtcctgttgcggccagtggctgagttagtggtgtggcaggcataggatccgctgttctttgtagtgatgttggggataaagagcttttgtgtgtattgctggaatgtgccattgacagaccaagaatactgtgagggtggattagaggccgcatggcaggagaggttgagatttacccctgcatggtaataggtgtctgaaggggaaatggtgggggcatctgggccatctagagcaaaagaataaagtcacaggtgatgtcatcagagggaaggggaagctcctggtctgtggaagagccacagtgtccctctgagccaagtcacaaacctgagccaagtcccaaccaaccccaaccaaacccccgctgtttctactgagacagagtccgagacatttacctgtttctcccatcagaagatgtggactccaagtctcccatgacaggagcaccccctcccctcttattcttggtcaaggctaggcctacccatgtttgcctggggcagaaagtcatgacgagctgggtttctaggggtgggtggggaatctgcatttttggagctgagagggactgagaggcctggcctctggctgcgtggatttgggctggtggcctgggccacagaggaacagaagatactcacagaggacattcagggtgactgggtcactgaagtttgcactcgctgggttctgtatttcacattcatagggtcctacgtcattccttgtgacactgagtagagtgagggtcctgttgccattggacagctgcagcctgggactgaccgggagactctgaccatttacccaccacaggtaggttgtgttctgagtctcaggttcacaggtgaaggccacagcatccttgtcctccacggggttggagttgttgctggagatggagggcttgggagtctccgctgtgcagaaaacagagagaagattgccctgtgtggcacctttgattcctccacaggcaaatttcaattagagttggcatctcccacctctcagcctactcgagtccttaaaagcccacggtgggtgtgtgtgtcacaagacagatgcacaatgatcggggctcagagaccatgaggccgccttctctgtgtgggagaaacacagactttctcaaatgtgaattgggcagcagcgctgggttgtggacagacccaggactgggagttacagatcctggtgcctcttctggtccctccctgaccggctgcctgcctggcctacctaggggtcctcacctggaacatgtaggtgctgggtcccttccagcttcacagtcctactttgcccttcgaggtgtgtttttgagggttctgtttccaagaacattctagagatgggagatgatgggacatgccactatccttaattcctgactgggtgtttcaacagaaataacacaggggaggccggggcaagcctggaggtcggttccgtcgtcaggcagtggagccacaaggtggggcagtttttcccaggtgtttcatcgtgacttacttgagtcagtgacctctaaagatagagcagagtccaaggaatgatctagaaggagtgaaggggacaggcaagaacaggtggctttggagcagaaccttgtttcctttccttggtttttaatgtcccttctttccctgcggggggcagatgaggagctgtggatcctcccataaatacatgtggacatttgcaaatgcaaactgacgggtggggagggggagcctgaagtgctggaaatttggccctcatggaccgtgggtgtttgacagttatgagagagaaatttgggaagaagttttgcaaatattttctcctactggacattatacagagtgaaataagccactgacaggacagatactgtaggattccacttacatgaggttcctagggtagtcacactcatggaatcacgtagtagaatggtggttgctatgggctgggagtggggggaatggagagttgttcatgggtctgcagtttcagttacacaggatgaggaggttctagagatctgctgtacagctttgtgcctatagctcatatacagtgagtatttcttatgcataaggcttagggccaaaagtgttttgaatttctaacttttataaatttttgaacatttgcagtatacttactggtttagcatctcaaatctgaaaatcccaaatccaaaatgctccagtgagcatttcttttgagaatcacgttagtggccaaaaaatgtggaattttggagcatttcagatttgggatttttgatggtcaatgtgtaactctaatttgcattttaaaatttgtcaggagtttagatattatgttttgactatagtcaaaaacaaaattggaggaaacatgaatttttttccataagtagaaattgctattaattgtccacagatctaaaatcaattggtggaaggagtatttctcttgataacaaaataaggtttaggcgtcctgtgaattccagcaggatcacattatgctcaaaggaagatcctgaagttcgcttgaaattagcaactcccaggtagagggaggcacgtgagtcctgttaagaggacagaaccggtcagagaggaagtcttaggtgtgtcaattccataaagggaggaacaatgccaaattaggagaagcgatgtgtgttatgttagtaaatttagaaagcttcctgcccctaattcctatgcagagttaggcaaaattgggaggagcccaaaacaggtatgcgcaatgctttcttcattttctcttgacctcgggagacacaagtagaattggattaggtttttgcgaattggacagagtctaagtgagacgccagtggctcatgcgtctccccacctgaaggaccccatcttatcacaatggtgccatcatgaggacacagatgtgtgtggaacaggcagtaagcccatcagacagcacctgcctggccatccaggatctagtctctaaagaggttttgcatcattcattctctcattcattccctctccatgagagaacgatcgagtgtgtgtcacatgttgggcctgtcctggtgcagggtgtgagtggggagagaaagcaaagtcctctcttttgtcctcccatgggagtgacagcaacacatcaggaaacaggatttcaggttcagtgaggggggttaggatcttagagggagcctggacattcctcgcactggctctgacagttggggcaggtgatttagttctggagtacgaatgaatcagttgcttatttgctctcacttctctgagctttggatgctcaggaagaaaggatttgagccaatggatgaccatggggtccgtggaacgcaataagccctgccttcttgtggaagagaggacggggctgtggctggagagagacctcatgtgaccctgatctatccctcgtgtttgtgtgaccctggttcagtgactgtgtcttcctgtgcctccgtttcttctcaataataagcttctattaaaagaaataataggctgagcgcagtggctcatgcctgtaatcccagcattttgggaggccgaggcaggcggatcatgaggtcaagaaatcgagaccatcctggccaacatggtaaaactctgtctctaataaaaataccaaaattagctaggggtggtggcatgcacctgtagtcccagctactcgggaggctgaggcaggagaatcgcttgaacccgggaggcagaggttgcagtgagctgagatcgcaccactgcactccagcctggccacagagactccgtctcaaaaaaaaaaaaaaaaaaaaaaagaaataaaaagaattattatttctttctcaataggaaaatgatattttctgccaggttttctatgaattagcattaaattatccatagtcacctgacctgaagcttgcacagaggaggcgctcacacaaacagcacgggttattatttgcctccatgagagggtccccttggcatgatccctgctggacaagttgctgttaggaacatctttcttctatttctgtccctggggacactgaactttctatggagtctcctaagcctcccaggccagttggctgatggcctaagaagcttgtccatctgtcctctccactctgagtctcaggtgaaggacaagactctgtccttgcccagatgaggctctggggtctaagccctggctggtgagcagctccaggagccacagcccttggatggctggtaaatctttgctcctagttggccctgcccaggaggctacaacccagtgctggcacaggtttcccagggttacctggagtcaggatcctgggacaggggtctggagcaggggcttccagggatgaacttctctgtgaggatcccaggatcccagggagcccctcaggtcaggccctgacccagttctttagagtttttctcagggtcaggtccatggggagggcacggggtgcctggctgagtctgatctccttctgctgagtccccccatcagactgtcattcctctgccgtgagtgtctgcagggtctggatgcaggaaaggaattctggtctgtggaagtctgtctcccctgagtgtgtcctgcactaaatgtccaaaccctaaagtgggatgtaatgcagagagggacatgggcacagcccaggcctaacaatcctgtgtgtgggaagtagaactgacccccaacacccagaggtcatggggaatcactcacgatgtacgctgaactggccagttacttcttcactcataagatttagctttatgacttgtagggtgtaggatcctgtgtcatttctggtgacgttccgcatcagcagggatgcattggggtatattgtctctcgattgctgtatgcaggccctggggtaatctgttgatttgatattacatatcctataattcgacggttggcatccactgtttcccctttgtaccagttgtagccacgagggtcctggggcagattgtggacaagtagaagaacctccttcccctctgcagcattggatggcacagcttcaatagtgagctgagcagtggtgggcgggttccagaaggtgaaaagtgaggctaggagggggagagagcatcaagcaatattgcaacatatgtattggagtagaaaaatggggacatcagctttggagtttgtgtgtttttatgtgtgtgtatgtgtgtgtgtcctactgagtcaatgtcagcagcacagcccccatttcttcaacacctctgaccttggcatttccctggtggaatcctcttcttcagggttctgcacggctccctccacactgccctcagatcctgctcacatcagggcatccttgggagaccctttctctgacacctcctctagagacactgggtcttccctttctgacctttccctgctgtgttccttccagggctcctgtcagcgcctgacctcacattctagatctctttgtctgtcttcctccccaggagagtgtgagctctgtgagggcagggacttgtgtggtgttggctgcaccccagtgcctgggacaggcttcagactcctgtggatgagttcctgagcattccctgggccctctgcttcctgaggcttatttgccaatgtctgacattgttggctgaggacaatgtttcataccctggttatgctttatttgaagtgtcatctggtatggttattattatcatttttcaaaatgtagtggccagtgatgattaaccaggaatatggaacacttgagatgttcctgcctcttaccaattccagttcaatgtgattttcctgttgtgaccccttcccctctcttgtgtcctctcctctattaaggctccaacagaagtcctctgtcccctctcagagccccgtcctccccaggagaccccagccagtcactgtgtttcctcctcctgtcctttcccaggaagtcctctcctcacctgtgagcaggagcccctgccaggggatgcgccatctgcaggaaggggctgagatgggccccatggtctctgctgcctgcgtgttctcctctgtggagatgagcctgggatccagaaactttctgagcacggctgtcagctgtgctgtccttcctccttttgtgctgagcctcttcccggggcaggagcacttctcaggctcatgggcggggtctgtgcccaggacacctctctgtcccctcccctctcagtcctgcctccctgtccctcctttccctttattttctgtctgtgtttcaggcccctgggaattgctgaggtctctgactccttcagcagtgattctctcacccaacctctgcacacactatgcagacacacacacacagagacacacacatacacaaagagacacacacagtcacacatacaccctggagactgggtgagcacagccctgtgccctcagcatcctgcagcctatgtctccaggtcggggtgcacagtcgctccccctgccctctcccatccccatctggctcttcccttcagatcaggaggtcagcgctccgcaaggaccctgtcacagggacaccaccactgagctttggggaggtgtgtgctcactggtgagagggatcctccccctctctcattgtgtcaagcttggttgcagcttccaaggatggacattcaatgccctggatatcccagaggggactgtccttactggtggtgtgcagggcaaataatctcttatgcctcctgagagagagggctgttctggttggtcagtgggggctgtgggcctagtggtcatcagggacaggtatcagccattctcttgctctttgggttctggcagctgagctggggctcgggccttccatgttctctctgaccatcttgggtgtcctctgttttcgcccggctgactgtcctgtggtcaccccaccttccctatggttggtgcagcaggaagtggggagttgcccaggggccccacaagacagtgctctctgagatccaggagagggagcctgggacagagcaggggctcagagctggagagactcatcccaacttactctgcagccaggatgggctcagccctccccatgctgatatcccctggggtctgtcctaagggtttggacctggtcaggcccctctgtgtagagaaaggatgggcagcggccggggagcccgtctggggggacgttgctcacacctgagagggcaggtaggggtgggccatgttctgggaacaaagggagctcattccttgccccccagcttgtgtacatgagagagcgctgtcctccctcctggcttcacgaaggacagcagggggcaggtggctacatcccagacagtgcctgggcgtgaccatcacatactctccgagcctcctggggtgcagagggaaggtcatagggtgcctggctgattccccagaggcactgtgggccctcaggcagctgtggttctgtcagcgctgggctcagcctgccatgccgtagagaacaggacacacggagcaggggcgggtatttagggagcagtcacagaaagagttgatgaggatggagggaggtcacgaggggaaagcgcccagtgtggcatcccgtgcaccagcgctgccctgggagatgccttaactaggcccagggaaggattgggtgtgtggggcaggagctgcctgcagagggggcggcctcatgttgccggctgcctggctgcagggaggagctgacagagtccgtatggggagcttggagggtaaggaggacgtgggccgaggtgccctggtgagggtggaccctgctgggctgtgggttccgctgagggaggtcagcagcccctgggaaggctccaggctggagggactctgtcgccctctggtggactggaagggaagtgtgggtggccgcagtcccaggtccggctgcgtgttttattccacatggatctgcacatttcacacgaggtcacccacatgttatgtcgagctccatcacattccacatccgtgtttttctctgtggctgattctctggtgtgatctctgagcctgtgttagtcctcctcacaatggtcacagctgtgtgtggagatctaatggggtgtgtgtggctcatgtgctcacacagagtgtcctggggtcaggctttatgacctaccctgccccaactccacaacaagatctgaataatgcgccaagtaagataaagtcagaatccatgggggagggtgagagtcctggcagtgctgaggtctgtgtctccagcttaactctcagtctctttgcaaatacatttatgttgtgcatctgcagttggctgggcagtttcatgtctctgaatccttgaatctctctgtggataaggtcatgtagggactgcatgtaagtgtatgagggctatctgattagggtgggtatgttttacgtagtaggttttcttcaccaaagacttttcaaaaaattgtggtagagtgtatatatgtacattcatatatcacctccacttcctgagttcaagcgattctcctgcctcagcctcccaagtagctgggactacaagcgtgcaccaccatgccgggctaatttttgtatttttagtagaggtggggtttcaccatgctggccaggctggtctcaaactcctgaacttgtgatctacctgcctcagcctcccaaagtgctgggattacaggcatgagccactgcacccggcctgtatatcttctttgaagaaatgtctatttgagtttttgcccatttataaacggggtggtttgtctttttgttattgagttgtagcagttctttatatattctggacaggaagctcttctatatgtaatttgcaaattttttctcccattctgtgcctggtcttttcactttcttcataatgtcctttgatgcacaaaaggcttgcatcttcataaggcttaatttatctctttttccttgttgttgctcatgcttttgtgtcatatctaacaatccattaccacattcgaagtcatcaagatctacccctctttttctttttttaaaaaatatatattttatttacataggttttttggggaaccgattggtatttggttacatgagtaagttctttagtggtgatttttgagattttggtgcacccatcacccaagcagtatacactgaacccaatttgtagtattttttccctcactcccttcccaccctttttacctgagtccccaaaatccattttgtaattcttatgcctttacatcctcatcacttagctcccacttatgaatgagaacatacgatgtttggttttccattcctgagtcacttcacttagaataatagtcttcaatcccatccaggttgctgaggatgccattaattcattcctttttatggctgagtagtattccatcatacacacacacacacacacacacacacacacacacacacacacatatatatacataccaagtttctttatccactcattgattgatggacatttttgttggttccacatttttgcaattgcaaattgtgctgctataaacatgcatgtgcaagtatctttttgtataatgacttcttttcttctgggtagataccaaaagtgggattgctggatcaaatggtagttctacttttagttctttaaggaatctccacactggtttccataatggttgcactagtttacattcccaccagcagtgtagaagtgttcccttttcacaacattcataccaacatctattattttttattatggccatcgttgcaggagaaaggtggtattgcattgtggttttgatttgcattccctgattattagtgatgttgagtatttttatatgtttattggccatttatatatctttcttcaagaattgtctatgcatgtcctttgcccactttttgatgggattgtttgtttgttttttccttgctaatttgattgagttcattatagattctagatattagtcctttgtcagatgtatagattgtgaagattttctcccactctgtggggtgtctgtttactctgctgactgttccttttgtcgtgcaaatgctctttagtttaattaagtcccagctatttatctttgtttttattgcatttgcttttgggttgtcatgaactctttcctaagccaatgtctagaagggtttttctgatgttatcttctataatttttatagtttcaggtcttagatttaagtccttatcaatcttgagttgatttttgtataaggtgagagatgaggatccactttcattcttctacatgtggcttgtcaattattccagcaccatttgttgaatagggtgtcatttttccacactatgtttttgtttgctttgtcaaagatcagttgactgtaagtatttgggtttgtttctgggttctctgttctgttctattgtttcatctgcctatttttatactagtaccatgctgttttggtgactatggctttatagtatagtttggaatcaggtaatgtgatgcctccagatttgttctttttgcttagtcttgctttggctgtgtgggctctttttggttctatgtgaattttagaatttttttttctagttctgtgaagaataatggtggtattttgatgggaattgcattggatttgtagattgcttttggcagtatggtcattttcacaatattgattctacccatccatgagcatgggatgtatttccatttgtttgtgtcatctctgatttatttcaggagtgttttgtagttttccttgtagagatcttttaccaccttggttaggtatattgctaagtatttttttccagtattgtaaaaggagttgagttcttgatttgattctcagcctggtcactgttggtgtataggagaactccatcacattccagacccatgagtccgtctctgtgattgcaagttcactgccctgcctctttcacagtcagatgttccaaatgcagattttgtgtcaccttctgtgagtttgtgtttgtgtgcagtaggttgtactgtgtatgcccggggtgcaatgatgccttgagctgagcactgggcaggggtttgggagcagaagagggaggtgcagggcgggaatatcaatgttaggggagcagggggagcagggacaaatcatcttcatttcttgttgtcagggacaaattctggggcacagcacctggttctggggcacagcaacccactgtttgtgttcctgggtgttgtgagtgctcataatttcatgtgtccttggcatccatttcttaaggtgtaagcttaactgcctcatatcagaggcaggacttggtcaccatgacagtttccaatactgtacccggtcaaaaaggctccagttggtggccagagataaaatcttagaggcatctctcctgggctcccctccctccagctgcttcctttaaactgatcattctgacatttgtcctcaaatttaaagtgaccacctctcagtcacagtatgatctccttgacccagtgttcacttgttttaaacctgtccattaaagctccctgttgtaaacctgtcggataactctgtggacccagtaaagccactggcttacaggactcttctctcctccctccctgggctccctgacctctgtgtctgtggtctccaggtgtgctgtgtgctcccccatgtctgtaagtagtaaaactcttacactttattttattattattatttctaattttttgagacagagtctctttctgtcacccaggctggaatgcagcggtacaatctctgctcatggcaacctctgcctcctgggttcatttttgcctcagcctcgcgagtagctgggattacaggcttgtgccaccatgtctggctaattttttgtatttttagtggagatggagtttcattgtggtggccaggcgggtttcaaactactgacctcaggtaatccacctgcctcttaaagtgttgggattacagacatgagccagtacacctgtccagaactcttacacttttacattgtggttgtgtcactcactgaagcctcacctgccatctggggcctgacatcgaggctgacccaagggacccatgcaggttgagcccctgctggagtgcttttcttgaggccttggtgctgctggggacaggagctgccagctaatttgatagagaacctgaagagtttcactcaaaaccctgggctagatgatgtatttctgggcttgggctgctataacaaacaccatagcctgggtgacttaaacaatagagatctatttctcatcgttatggaggctgggaaatccaaggtcaaggagacaggtgactcagccctggtgagggcttccttgcagatgcctactttctttgtgtatctgcacatggtgcgggtttttgaaggggtggagagacagagcgagggagaaggagagatgccattctcttgtattttccttttattataaggggattaattccatcatgaagcccccagctttatgacctagtcattctctaattacctcctaaagaccccacctccaaattccatttcattaaggatgagagtttcaacaattttgtgggggacacattaagtttcttttttcttttttttgagatggagcctcactctgtcatccaggctaaagtacagcggcatgatcttggctcactgccacctctgtctcccaggttcaagtgattctcctccctcagcatccccagtagctaggattacaggcatgcactaccacgccttggctaatttttgtatttttagtagagatggggtctccccatgttggccaggttggtctcaaacttctgacctcaaatgagccacttgccttggtctcccaaagtgctgggattacaggctgacttattcagtttctagcaggggaggtgagagctgctttccctcctgttcatgggacctggccttttctgctgagatggcttcacactcataatctcaccctaggctgcagacccacagagcctgtgtcctcgactcctctcctgcccattcctgggtattccttcctgcaccacgttctccgtgtggccccacctgctctcgttccagggagctgcccctgggttgctgcccctctcaccatctttgggctcactggcctctgccatttcttctgagccctgaacactgatccctggcagggaggaagtgtgaagctggaatgggtgctgtccaaggtgctgctctctgtggacagtttgacagtgagggaacctgatgtgtcaccccagaggaggcccaaaagctgtttctcaggggtgcctggattgtagtggggtgggtacattagagtgggctggaccatggactgcagggaacctgttctgtgtcagcgaccagctcctcaagctccatgttattctctgtaactgactgccttgtgtgctccctgagcccaagatagattccttcccacaatgtccagagagtcagagctgtgtttggagacctaatggggggtcttgtgtgcttacacagagtgtccagagaacaggcttcatgacctcccctgccccacccccacatcaaggtctggatagtgggccaggtcagataaagtcagaatccatggggagggtgttgtcctggcagtgctgaggtctgtgcccccagcttaattctcagtctctttgcaaatacatttaagttgtgcatctgcagttggctgggcagcctcatgtctccaaattcttggatctccctctggataaagtcatgaagggtttgcatataagtatatgagggctatctgatcagggtgggttttacatatacatatatgatacatatttacaaatatgcataatacatttattatgtattatgccattttaaccactttaaaatgtgcaatcaaatggaattaaccaccatcaccactatctttcctagaaatttctcatcattccaaactgaaacgctttatctttttttttttgttttgttttgaaacaaagtctctctctattgcccaggctggagtgcagtggcgcgatctcggctcactactacctctgcctcctgggttcaagcgattctcctgcctcagcctccagagtagctgggattacaggcgtgtgccaccacgcccagctaatttttttgtatttttagtagagatggggtttgaactgttttggccaggctggtctcaaactcctgaccttgtagtctgcctgcttcggcctcccaaagttctgggattacaggcttgagccaccgcgcccggccaaccgtgtatcttttaaacaataacttccgattttgtccaccctagacctcggtaatctctagtctgctttctgtctctatgaatttgcctattcttgatgtttcatataagtggtgtcatacacatatgtcattttgtttctggcatatttcaatagcataatgtttccgaggtccatccatgttccagtgtgcgtcagagttttgttcttctttatagctgattaacttgctgttgtatgtatcgccatatttgtttatctattcatgtgttgatggacacttgggttgtttctatattttatctattgtgaatagtgctgcaatcaacattcccattcaagtacttctttgagtctctggattcaattttttgggtatatacctaggaaaggatgttgttttatatgggaagtctatgattagctctttgaggaagagcacaactgtttctcatagtggctgtacctttttgtattctcaccagcaatgtataaggattctaaattctacataagtctcccacttgttatttaacattttaaaagaatggtaactattcccctaatgactaatgaagttgagggtcttttcatgtcctcaactatttgtatatcttctttgaataaatgtctatttgagtccttttcccatttataaattgggaggtttgtctttttgttattgagttgtagcagttatttatatattctggacatgaaacccttgtctataagatttgcaatttttttctcccattctgtgtctggtcttttcactttctggataatgtccattgatataaaaaatacttgcatcttgataaagcccaatttatctatttttcatttttgtgtctcctgcattcatgtcatatctaagaatttattgtcacatttgaggtcatcacgattcacccctacatcttttctaagacatttttatggttttagcttttatatttaagtcactgatcaattttgaggtaattgtatgatatggtgggatgaagagttccataagttgtttttcatgtggttatccagttgtccctaaaccattatttgagaagactattcataccccattaaattatcttgacactcttgttaaggagcaattgaccataagtatgagggtttatttccggactctgagttctatcccattggtctctgtgtgtatccttatgccagtagcacacccttttaataattgtactgttcatgagatttcaaataagaaagtacaagtcctccaatttattttggcaagattgttttggctatttaggggtacttttttttttttttttgaaaaacaactaggtcaatggttcacaattggggaaggcttttctctttcctcctggagggaatttggctgtctagagacctttttaggaacctaatctaaatagataaattatccccacttcccttgctgaggtgttgtgttaaagtgtgcattgcctcctgtggaaaaattgagagatcctggaagcacttggccatgtggtgagggacagcaagttccatgatgatgggcagagacgacatcgtttggaacacagtgttgttggaggagctgtatgcatctctacttctttatttctctgtacaacccacatctccaccagacacagtagatattaaaatcattgtttatcctctggtgcacggatcttggctgacctgtcagcaggagctagaagtgatacctggcaaggcaggggaggagcagggctcagcagggtgaaagcagctgggacccagagaagccagaaaggtctgactcttagaaactaggggccaggaagtgggtgtcctcaggggcaaatggatcacagtggtacccattgcagtggactggaagaaggtaagagacactgggtatcctatgtcctctcttagctccctaactgaagatttggggcctgggctggttgtgtcctgtagcaggcagcgggtagacagggatggctgcatatcaggccacagtctatgtcatcttgtcaggcattgtcactgcagatggagaattctgttcagatgcctggcctgggcacatgtaagggaccaccttattcttttaaaattattttaagaaaacaatatcagcaaatgtgatcaatgtttatttttctagaatcattattaatgtcatgttttacaacatgtctcttagggaaatggtgagaaccgtgaacacaatgtgtgttttaagtggactctcctataatttcaacttttatacattcttatagaaactattttctctgtgaacacaaaggtaatatccctgtgttcatttctacttggaactctgtattcagggtggagcgagttacatttccccataaaagatggaaagcatttgactaccagaaaaagtgtctaaaagctgctggtaatgattatagggctgcaggtggaggtcagttcaagagaggtgagggaaactaatgttgagtactttttctcaaaataatgtgcagaaggaacaaccttggcccacctcatgttgggatgaatgagggacagaaatagaggtcagtaatttaaagatcaaattcaagagtgggcaacaggtttgagattggaatgggtgtgagaggtggacggatgaatggtgaagatgttcaaaacaccttcctaccccatattgagcccctgaggttgagacagtgtccagagcaggggcagcagaatgctgtgagctcacagggctggcatgagactttagcacagtctagctactacgtctattttgggatggattcatatttaaggaataatctaacagtatacaattttgaaaatatatagaaattcctttgctatgaatttcttcttcataagatatttcttcttaatgagagaattgatttttttttgagatggagtcgcaatctgtcacccaggctggagtacagtggcatgatctcgactcattgtaacctccacctcctgagttcaagcgattctcctgcctcagcctcctgagtagctgggattataggcatacaccaccaagccaggctaatttttgtatttttagtaaagacagggtttcaccatggtgatcaggctgatctcgaacttctgacctcgtgatccgcctgccttggcctctcaaagtgctgggattacaggcatgagtgaggtggactgtagaccctttcgatttgtggttacagacccttggaaaagcctcacgcttcctgctgtgaggtacaggtagtcatgtggcatcacctctaaacgtgtcttctcctgagacatcaagtttctgattaagtcaaaatcatttcaacagatattgaagatgtcagttttactctcacactcacaattcttctaccaagagatgaaagattttactggtgacttgtttgtagatattaagatagatcagtgatttggacgggaaattttgccctccagggggcatctggcaatgtccggagacattgttggttgtcagagctgggggagagcccacaaatggtgctgaacatcctagagctcacagacagccccaccagcatgaccaccccaaatgtcattgctgaggagtggagagccctgcggtgcccttcctcagcttccctggggcttcctctcacctgcttctcccatctctcccgaccactccttcacctcagttccatcgttgcccaacagtcctctccacctgaacttgctcttagtccaaggccagccctgatctctcaactctcctggcttccttttgctccttagcaggaggtgcccactagagggcgcactcgcccttcccggcactcaggctctacctttcctttctaagacaagcgtggctggcacaatcccagccctcaacagtctttaggtttgctcacggggcagctcttggacaggcatcaggaaccccagggaggagcctgactctggagatttttgtgcatggactggggacccggagccaccccagggcccaagtcactggggaggggctgggtccgtgcacggggccgcacactcagggtccagacactcctgccctgtgtgggtgctggggacatggccatgcgcctgtgtccctaaagcctctgtcactcaggatttgtgcctgaggaccttggctgggctgctgtgtaaacttccagatggagcctttcccagtggggcacgagtcctcccagagatttcaaggagggccttcaccaggaagaatcaggaggaatgtgacagccaccagggtgtagtttccctccagggcctgaaaagaggcacctctcttcatcatttgcccagagtatttgtactgtctccatcatgatggaatgatgccattttgcttctgttctgctaataataattttgtttctagctaatctgttgatgtagtaaaaacaattgttaacgttgctatgttaaagtgtggcattttaacatgatgttaaaacactatgttaaaccttgcatttctggggaagcaactcaaggtggtaaattctgactcattttggtcgtacttcatttgtggattttccgtctttgtttctgagtagggcctgcaattttactttttcattgtttcctggttggcctttgataagaaggttctacttccacaaaaatgagttaatgagtattgtttattttctttttctctggaagtgttgtgtaaggttgataggagctggtctttgattgttttgtagattttaaaaatttaaactgaagagattttatacttcttgtttggtgaagtaacatggacatagcataatgtctgcatgtttgtgtgtgccaatgacagccctgtccagatcaagacagagcacattgtctgcaccaagcgacactcctgcgcccctcccagccactgcaagcaccaggtcactgtcattctgatctctatcaccagagatgagttttgcctcttgggaactttatagctgtagaatcaggcttcattttcccttctgcattggctcctttcttgcaactagttgtgtgagatcatgcatgttttatgtagcaggaatccatttattttcatgttgtaaattatccattagtttgaatacaccacagttttatcccctgtattgttgcacatttggactgcgacactatttgggtcttctgaatcatgctgatgtggacgtttctacacacatattttggtggccttactcatttccttgggtgtagagaccattgcatatgctggaacttctaagattgtagattttcctgttagagagttgatcacatctaaattcccaccagcaacatctccgtgtccagttgttccaactcttgttattggcagtcgattgaattttagcctttcttatgttgttgggatgagatttcataatggttttaatatgcctttcctaaataaacaacagtgtaaatgcatcttttcatgtcgtcatgggccattacacatgttctaccatctggtgcctcttagagttttctgccatttaaaaacattgtgttgtcagtctttctcttattgttattttgttatgtaccttgggtgtggcttctttgtcatttagatagatacacatgtctgtatacgtcttgtgtatgtaggagagagggaaaattgggagccttttgaagaacagacattctcaatgtcaatgaattttatctgttgttaaaagattgtcatgtcatgtgaattagagatgtagatttatctttttttctctgtagagatattcatggtcatctcaaatcatctgctttttgtgagtatgcacacgtgtgcatatgtttgcatgtgtgcaaatattgtaattattaagtaagattttaagatgggtggctgggcattgtggctcatccctgtaatcccagcactttgggaggctgaggcaggatttgagcctaggtggtgcagaccagcctgggcaacatgatgaatccctgtctctattaaaaatataaaaaattagccaggcatgatggcatgcccctgtagtcccacccagctttgctcacttcttataaggaagatgagtttcctgttcctgtgacaatggagaacagccttcagcttggtttcctctcagctaaggagctggtttggggttttgttttagaatttggtagttgtaggttaagggttaaggtttcttgatacttggctctaacctctccttatgcctagagtgttcaacagtatgtaatttgtgcaattgctttttgtgattttggtttttatcattcttcttttggatttaaccaacccttcaccgtgtctagagtttaaaacaccttccaagttggtcaaatccaacaggagctccacattatgatgaaccaggcctctaaaatggaaaaaccccaactgcataacatcaaattttagctctagaaacacctgctggttgaaggaaataaaaatattttaacccaaagtatagtagtatagttccttgacaaattttgaggtggctgatagagggtcagcaaacagaagtggccctgcagagctgtctctcatgggaaaatttacatctgtagagaatctttattaatgcaggcaggtcttcctttatctggatctgggaaaattcttttttttttttttttattgatcattcttgggtgtttctcgcagagggggatttggcagggtcataggacaatagtggagggaaggtcagcagataaacaagtgaacaaaggtctctggttttcctaggcagaggaccctgcagccttccgcagtgtttgtgtccctgggtacttgagattagggagtggtgatgattcttaacgagcaagccgccttcaagcatctgtttaacaaagcacatcttgcaccgcccttaatccatttaaccctgagtggacacagcacatgtttcagagagcacagggttgggggtaaggttaccgatcaacaggatcccaaggcagaagaatttttcttagtacagaacaaaatgaaaagtctcccatgtctacttctttctacacagacacggcaaccatccgatttctcaatcttttccccacctttcccccctttctattccacaaaaccgccattgtcatcccggcccgttctcaatgagctgttgggtacacctcccagacggggtggctggccgggcagaggggcccctcacttcccagtaggggcggccgggcagaggcgcccctcacctcccggatggggcggctggccgggcggggggctgacccccctcacctccctcccggacggggcggctggccgggcggggggctgaccccccacctccctcccggacggggtggctggccgggcggggggctgacccccccacctccctcctggacggggcggctggccgggcggggggctgacccccccacctccctcccagatggggtggctggcctggcgggggctgacccccacctccctcccggatggggtggctgccgggcggagatgctcctcacttcccagacggggcggctgctgggcggaggggctcctcacttctcagacggggtggccgggcagagatgctcctcacgtcccagacggggtcgcggtggggcagaggcgctcctcacatcccagacggggtggcggggcagaggtgctccccacatctcagatgatgggcggccaggcagaggcgctcctcacttcctagatgggatggcggccgggcagagacgctcctcactttccagactgggcagccaggcagaggggctcctcacgtcccagacgatgggcggctgggcagagacgctcttcacttcccagacggggtggcggccgggcagaggctgcattctcggcactttgggaggccaaggcaggcggctgggaggtggaggttgtagcgagccgcgatcacgccactgcactccagcctgggcaccattgagcactgagtgaaccagactccttctgcaatcccggcacctcgggaggccgaggctggcggatcactcgcggttaggagctggagaccagcccggccaacacagcgaaaccccgtctccaccaaaaaagtacgaaaaccagtcaggcctggcggtgcgtgcctgtaatcgcaggcactcggcaggctgaggcaggagaatcaggcagggaggttgcagtgagccgagatggcagcagtacagtccagcttcggctgggcatcagagggagaccgtggaaagagagggagagggagaccatggggagagggagagggagagggagaggccaactgaatcttctaacttatatatcaaaaagaaatatttaccatccattctctaggagggctgccacctacaaggtttcatttacataacaagaccagctttgctagaaaaaaacagtttttctttcatctataacttgtcttgccactgaaacctgatttaccatcataacctgtttttggccatgcaggaatgcaagaaaataatcagccagcaaaacagtaagaatttattacactcaaggctgctggcttctgtccgtgcaatctttttaatcagatggtaaaaatcagcgtttcttccactacattttgattaatgggaatggaagatttgtttatgactagtcttcatgtagtgactctggtatactttttagtaatttttgggtgtgaatattcatattgtttaatcccttttttcccagaggtagtcttgctaactaagctctgatctttttatcttgcccaaattcctatctaagtggtctgggaagtcataccctacaaaccataaattctcagcagatgggtttcatttaaccctaaatatcatgacttactttccagtctgactctggcataacattatgtgacaaagaagatcaaaatattttaccccaaaacatgtttctttgccatgttttgaaatggtcctgcaaagctgtcctttgtggaggaaaatgtgcatctgtaaagaatctctgttaacatagctaggtcttcttcttccaggccctcccaatcctgaagaaattcggtaagagcctaccacctttttgaaggtctgaataggaaacatttgtcatctgctgtctctaagggcagccactataagacttcaaaagaaccttggtctccacaattttttatctcaacctgaacatttcctttctattgatccaaggtatttagacaaactcaaccaactgtccatcagaaaatgtttaaatttacttgtagcctggaagtccccactttgaattgtcccacctttctgaaccaaaccaatatatttcttaaatgtatttgattgatgtctcatgcctccctaaaatgtatagaaccaagccgcaccccgaccaccttgggcacaggttctcaggacctactgagggctgggtcacgggccatggtcactcatatttggctcagactaaatctcctcaaatactttacagagtttggctcttttcgtcgacagtcttttccttcatctcttttcttctgtgttgttcatgaagtggggtactggataaagtttccttgtcatattccttgtctcatcttgtcatatgcccttgagggcttgatttgtgaccaagtgggagcactcattcttggtctccattatcagcagtgtgtgatttttgagtcacattaggtgaccagccttaaaatggttgggaacccgagattttttgttttgttttgtttgttccaaatgtgtcaagctcccaggagggcttgtcataagaagtcccatccataaggggcttttgtcattccaacttctgttgtctggatagggctgtggcaacaagagtcttttgctatcctagcctattgctgggagtgaatattttattttgttggggttgggggaaagacctctacaattgcttcttcattgaagagggctattgacttgagggctatttagaatcaatataccactggaaattctaattgtctatggccagaagatggattcctgaaatcagactcctatgttaaaagtattttagagatctcttattctaaacagttggtaggaggatcaaatttcaaagaaagacacgtaatcgtgttctggctagccttaaaaattctcttgactaaatttcagagcaaaaatctgacctaaaacaaagttaaatttttttgtaagctcaaactgcttgctttagatcccctgagggagtaagaataaaagccactccaatattccatttcatggaatagttaaaattccatgctttcactcctgacctggattttgtttcaagtcaaggaaccagcctcttttgttttgatatttatgtgatttttgactttttaaggtactcatttacctctttggagatgcctcatacatccttggctaagtcttggctaagtcgtaatcttgattaaggcttattagtttcagatgggaggatacttttggtaaaaaagtttcaaaaaccagaagtttcacctgtttgtcctagctaaaatctgatagtaagaaatctgaaagtgttacatgtatttagtcagacatgagcagggcaggagagagcctcccgtcccccgcatcaggactatcaggtgactattaggtgatggtcaggcagttgttaactgtctttctaaaataataattggccacagccagtgccagaaaaaggcagtctcccaatacataggaaacacctgaaactggtgattagcagcttcccgataagttctcagaagttgggtgagtgggctcaagcatgtgcattaagaggcaaaattgcagagtttaattggtatatgaccttccagggacctttgactggtaagggaagaaagcctcaagtgatcatgcgcacagctccagtaaacacactgcacatgctcctctccgaagtgctggcaggccactgtgcgtgccgacagcccactccaaggaaagaatcaggggaggagagatgcagaccccagaattagtccaacatacaaaagcctaagtcaaatgtcaaacctcatacttgatctcttgtcacctgcttagccctcttttaagcgtactttacttcctttaatttctgctctaaacctttttaataaaacttcactcctgctataaaagttgcctcagtctctgcttctgccttatgccccttagtcaaattctttcttctgaagaggcaagaattgaggttgctataggcttgtacagatttgctgctgctaatattctttggtgccatgactcagctacatttggctgctaagcaaagaatttttaaaaagagctctattgttaaaagtcagcttaattaaaagctgattttcaagccatatatttattttatattaaatatatatcttcatatagaatatatattcctatagaatatatataggatatgtagatattcctatagaatgtatgtataggatatatagatattcctatagaatgtatgtataggatatagatattcctatagaatatataggatatatatattcatattgtatatacattcagaaagggcttgaaggcctcaaggcctttctgcttttcttttttgtatctttaaaagtttttttccagttgactgaaatctttcaaaatcatatacttagtctctctgtttctttctcaaggattctttttcagttcctttctgttcctcctttcttttgctacccttgatgctacatgaggggacctaaagaatttctaacagcctggtaccccttaaagaaaacagaaaagatgccacagactcccctgtttggaaagaaccacagtttttcctcatggaatcccaagagttgtaagtgaatggattcctctcaggtctaaaactctgctctcttttcaactgtgttgactgacctttttggcttctgggggatcagagtttactttttgttttcctttttttttttttttaatgagatggagtctctctctgtcgcccaggctggagtgcaatggcacgatctcagctcactgagacctctgcctctcaggttcaagcgattctcctgcctcagcctcccaagtagctgggactacaggcacatgccaccacacccggctaatttttgtgtttttagtgtatttttagtagagacagggtttcaccatgttggtcaggctggtctcaaacttctgacctcatgatccgcccaactcagcctcccaaagtgctgggattacagacttgagccactgtgcccggctcagagtttactttgtactgtaaaaagactcgaccttccttgtgtaatggctgctgggtcagtggtaagagctatggtttttgaggtaactaacagtggttagtcagtgattattacttcagagggctactcatctctttgcatgtttagataagaaagacatggtttaaacaactagaaaaagtccattttggcaaagtacactatggaagtgtttcacagtatgatccccatggcatattcctcttcttagggacgcgggattcagtgaaatccttgagttttaaaagtctagatgctgtcccttacaactgggtctccctttacacattgaaattattaagatctaaaaattacaaatacttcgttggccctcttctttaatgcgctcctctccaagctccctggaccagttggaaaacggagaccaaattaaaatctacatatctaaataaaatttatctccttataaaatcctatggtaaatttttatcattttggtgttaccttggcatctatttttaatcttccttgaacacacccaaattccttcttgtaaaaccttaaattctcaatctctctgtgctttgaggtatacatttgctacccattttctaaaactcagtaaagccttcctcagataaatgttaaccttttccatttacaaaggcacaatttgaattcaactgtctttttaaaaatagtgagttttactggtcccatgtttaaactcctaaaatcaaaacactaacatctgtctccctctatgtttatgtggacatgtatatatgttgtatcacatatgtgtatatgtctatacatatgtttattatttacacatggtatcaaattaatgtaaagataaatgagtactcataaattaagtaaataagctcaaatgcttttttcaatacatgtaattatagtaatcttttataaatatagttttaaaattattggtagaatgaagtagaaatgtcttaaaacaccttgaacatttaacaaccttcccaaaatcaaacttcagtttcaaaattgtcttccatggcacctggcttttcaaatatttcagatggcccctgaagtgtccaggaaagagaggtaaataggattatttgagatgtttaggtacatgggattgccaaaatgatgctcaatcttttttagattatatcttggtgaataatgctaatatatgttccaacattgtatgggatttctaaaattctaatgtctgagtatatgctatcaataataattaaggttttttttttttctttttagacggagtcttgctctgttgcccaggctggagtgcagtggcatgatcttggctcactgcaacctctgcctcctggtttaagtaattctcctgcctctacctcctgagtagctggaactacaggcacgtaccaccacgcccggctaattttttgtatttttaatagagacggggtttcactgtgttagccaggatgttgatctcctgacctcatgatccactcacctctgcctcccaaagtgctgggattacattcatgagccactgcgtgattgtgtttctaactgtaactaccctggacattttgctattcacagacaattgttatcttgttttaatccttttcaaagatggtttataatgagctatagaactttaacaggcactctcaaatacaagcttctgataactttggagatcataacattggaataaaggaaaatgtacaggactcataaagagcttaaatgttcaagaatatcaagcaaaacaagagttaactaaatgaactgaactcagaaagctgaagcaacatttgtttggaatattttgctgattcttgttttgcttttcagagtcaagaaaacttatttggaattatttacagcttttaacaattaagtaaggtatacacttctgtgatcaagatttggagcctgtttgtttctctctgcctggttcctctaaaatttggaaactatctgtgagtattcctatggcaatacagttgtttgaatcagtgcaataagaattcatttttcttttgcaacaggacacaattggagaaagtgattattttaccaaggctttgactggaaggctatgcttcccttgaaggagtcagtcttcacttggagaaccaataaaagccccaggaggagactggcctcatacccttgtttacacggtccctgtacagggttcatgacttatggtcagtaaagaatgtcactttctaacaggtccaggagttccaagtttattatgtgactttaagaggagaggatcacccaactcggggttatttaaggatgcaaacctatggctgggcttagctttaaaaggtcttatctgcaggaggctgaggcaggagaatggcatgaacccgggaggcggagcttgcagtgagccgagatcgcgccactgcactccagcctgggcgacagagcacaactctgtctcaaaaaaaaaaaaaaaaaaaagtctcatctgagattccttggggaacagagttccatcaaaatcaatccaaaaggcctatgtagaaataattattcttggccaggtacagtggctcacgcctgtaatcccagcactttgggaggccaaggcgtgtggatcatgaggtcaggagatcaagaccatcctggctaacacggtgaaacactgtctctactaaaaatacaaaaaattagctgggcatagtggcatgcgcctgtagtcccagctgctcaggaggctgaggcaggtgaatcgcttgaacccaggaggcggaggttgcagtgagtcgagatcgcgccactgcactccagcctgggtgacagagcgagactccatctcaaaaaacaaaaaaaaaaaaagaaaaaaagaaaaagaaatacttattcttgaaataaaagcttaacaaggttttcctgaggtgctaatctgttctttggcaaaatttctaaagggttataaaaggcttttgcttctttaaaatttatgagtcatcatttttggcaaaataaataacatagtaatctggaattctatttcataataacataatgaatatttcataaaatcttattaatcaagtattatgaatatcataatatttcataaaatcacacaggaagcattgtcacatatgaaatggtgttttgctttctttgggctatatttgtataaatatgttattggtatgtgttctaaagttatggaagactcctataattctgatatatcttagtgtacattataagtaataattattattgttatgttaaattattgtgtgacacagagttaacagatttccttgtcagttgtgtctttaactatggctaccctaaaactttttgtcatccacaaacagttgtcttgttttggtcctctttaaaaggtgattttataatcagctataaaggtctaacaggtgctcttgaatgcaggtttctgataagtttggagataagatggtgacatcagaatagaggaaaaacgttcagaactcttgaagagctaaaatgttcattaatatcaagcaggacaggaattaactgcgtgaactgaaataatagcagactggagtgatctttttaatgttttgctgaaaacattgctaatcctttgttttgctgttcagagtcaaagaaacttctcttttaagctattgacagtttttaacaatttagcatactcccatgaataaaatttggagcatatttgtttctctctacctgattttctcaataatttggaaactatctctgagtattcttaagttatggcaatatagttatttgcataagtgcaataagaatctgtcttcttttgtaacaggacacaattggaaaaactggttatttttaccaaggctttgactggaatggtagattcctttaagtaatcaaacttgacttcataggtggggctcgagcgttcattttgaaaaatgtttctgagtgattccaatgtgtagctatatttcccatcagatttatctgaatttttgtggcattcgctcctttcttttttggtattataattatttttcaggtcttatctcctctcttgggttttatgttccctggggtagggaccttgccttcttcatttctgtatctttcatgaacacatgaattggtcatcaggaaaaggttctcaaccacatgttggttgtgttctgagtctcagctttacacattagtgctagcgtcattgttctccatgagatcagaggttgcttgtgatgaaggttgtgggtaagtctgcagtgcagatggtggaggagagataccctgtttttgtatatagcattggaactaagaatattatttatatatggggtggagagtcagggatgtgtaggaagacagttctaattaggatggaggaattatactagggaattatactagggaatagatgaagtaaaggaagtaagaagtattagtaaagagaagaaatgagaacttatcaaattggccagagtagacccctgtagattcttgattaggtgaattaactagattttaggaaggtaatgagacagtcatatgcaaggaagatttcaaagtctggagacaagaagtcaagcaggacttcgagcagttgttgaggtttatgggaatggagagaatgacacaagtgagagatgttaaaaaaggatcaagagtctttggcaatgtactgaatctgagaaatgaatgagtggaggctggggataattacatttaaaagacagtgggggtacagggagcataaagaccagggagaagacctacaggaattagtgctgagaaacaagattggtggaaggaggagtagatccactcccagatacaggcaaagaagttctctccctctcccaagcatggcagtcatccttggagtaaacaggacaagaggaaaggccatcatacttgccagtcttagtgaaatgcagaaactacacctgggttgctatattagagccaccccagccagtactccagtcatgatgccgacagtgatcccagctgagaggccaggagaacttccttatcctgaagcagctgtcatggaaagaaaagaagagaataaatgaaggtgatgttattttacagtggagtgccccaggagccaactctcaggatgaagtaatttctacttgtttcttcaaggaatacattatttttgtgggaaagttgctgggaggtggttagccaactatatccttgaaatttgtcttcttctcactgtttctatgttggccatcagtcttctgtcaattctgtcctggcctttctgcactcagatatttttgaaggctttgggatatgagaaaagctgattgctattttctacatcattagaactttccaccttttcatgattgcatctttttttctcagtgtctcagtttgggcaggcatgaattagaccctgtcagatctctatggcagggacttgattgacagaaggttcaggtcagcgcattccaaattcacccactcctttgcacagagaccttgcttctcagggactcccagcaggggtatgaaagcaagcccagttctgtgagactttgttttattctcatgtgtgactggttggaggactccccatcagccttgctgaaactctcttagaactgccttgatacctaaaacttctttgtctttctccttcacaggaatcaggtctgcatcatggtctgagggctttcccaggctccttccatgcctgccccactttccctcacctgcatttttcctaataaattatcttgcatatctaatcccatcttggctgcatctcagtgggtaaaaatgaacataccaggcttgattgtttgcacttagcttttgttctttctctcccacatgtagtcagtaaccatgttctagtgttttctgtgttacctgtgcttccatatacgtatatatatgtgtgtgtgtgtgtgtgtgtgtatttacataaaataccttgtctacacacacacacacacaaacacatacacacacgcaataccttttgcatctgtttctttatttctgttgcaagcatttacttttagccctcactagtcaactcaggctggtgattaatgctatgttagttacggttgaggggcacctcctatatgccaggccctgtggtaaatactttacctgtatattatttgatttgtacaataaacctgtcaggtagacattgtttccattttacagacgaaaagctggaggcttagagtggtgaagaaactttcctgatgtcatatggctagtgaaaggcgaatctgagatttgactctaggcctcacttcaaggctaatattaatagtagtaataaagcaggtaacatttataagacatttcctctgcattttatggaaggtttcattgataattacattaaacctttagaacaatactatgaagcaagcactttcattgcaaatttcagttgaggaatcagaggctcagagaagttaaaaatcttgtacaagaaatttataactgtaaactcttacattagaaaagaagaaagatctcaaatcaacaacataatttacaacttcaggatataggagaagaacaaactaaacccagccatagtgaatgaaaaaaataataaggattagagtgaatataaataaaatggagaataaaaaaatggaagagattaatgaaaccaaaattggttcttcaaaataagatcaacaaaactgacaaccattaacttgattgactgagaaaaaagagagaagatttaaattactaaaatcggaaatgaaaatggagtctgggcatggtggctcatattttaattctagcactttcagaggtgtgtgggaggatcacttaaggccaggagttcatgaccaggctgggaaacacatgaatatccagtctgtataaaaaattcaaaacataatttgcagggcatagtggcatgcacctctagtcccagctacttgggaggctgaagaaaaaagattgcatgagcccaagaggttgaggctgtagtgacccatgattgtgcctctgcattccagcctgggctggcctatagagtgagaccctgtctctcttaggagacattactaccaattctaaagaaataatgattacaaaagtactgtgaataatgtatgccaataaattatataacctagatgaaatggacaaatttctggaaacacacaagaaaacccgagtagacatacaattagtaataagattgaaccaataaaagcatttgacaaaattcaatattctttcataataaaaacattctaactataaatggaaggaaaccacctcaacatagtaaaggtaatatgtgaaaagcccaatgctaacatcatacttaagggagaaagagtgtaagttttttctgtattatcagaaacaaggcaatgattcctgctttatctactttcattaaacatagtattgaaagtcctagtcagaaaaattagacaaggaagaaaaaagacattcacattggaaaggagtagaattatctctgtttgcagataacttgaatgtacatctagaaaactctgaagatagaaaaaaccattagaattaataaatcaattcaacaatattgcgggattcaaaatcaacgtgaaaacattagttatatttctataaactaacaataaaccatctgaaaggaaattaaaaaaaatttcaattcacattaacatcaaaaagaataaaatatttataagtttaagcaaggaggtgaaagaattctaccctgaaaactacaaaatattgctgaaagaaattaaaaatgacatcagtaaatggaaagacactttgttttcatggactagaagactcaacattgttaggaggacaatactatccaaaaacgtcagattcaaagaaatttatatcagaatcccagtaacattatttgtagaaacagaaaaatctatcctaaaattcatatggagtctcagggctctaaatagccaaacaattctgaaaatgaagagcaaaggcaaagtactcatactttctgatttcagcatttactacaaagccacagtaatcaatacagtgtgctgctggcataaaggaggacatagaaaccaatggcatagaatagagatcccagaaagaaatgcttgcatatatggccaaatgattatcaacaaggctgccaagaccattcaatggaaaaaggacagtcttttcaacaaatgatattggacaagctggatagcaatgggcaagaatgagtggaacctttatctaacaccatgtacaaaaattaacccacagtggatcaaagacctaaatgtcatagcaaaaataaaactcttagaagaaaacataggggaaaagctacatgacattggatttcacaatgattttttggttataacaacaaaagcataggcaactaaaaaaatgggtaaattggacttcatgaaaattaaaaacttttatatatcaaagaacattatcaagaaagtgaaatgaaaaggcaacccatgaagtgggaaaaatatttgtaaatcatatatctgataaggaattaatttccagaatatatgaagaactactacaaatgaacaacagcaaaaatccaaaaacccgattaaaaaatggacaaaggactaaaatagagatttctccaaggaagatatacaaatggccaataagcacatgcgaagatgctcaacatcactaatacttagggatatgcaaattaaaaccacaaggatgcaccacctcacacacattaggatagctttgataaaacaacagcaacaacaccaccaccacaaaacaagtgttttcaagtaggtgcaaaaattgaagctctattgcattgctgatggcaatgtaaaatgttatactgctgtggaaaatggtatggctgtttctcaaaaaattaaagaattaccatttgatccagcagttctgcttctggacatatacccaaagaactgaaaggaatttgaacagatatttgtacactgatgttcacagcagcatcactgacaacagccaacaggttgttgtgatgaactgaactgaaaagttaattgaaagataagtgcatagaaaactgaggtatatccatacactggaatgttattcaatcttaacaaggaatacaattcagatacgttgtgcaaaatgaaggaaccttgaagacatttatgctaagtgaaataagccagacacaaaaggacaattattagataatttcatttgtaggtggctgacgcctgtaatcccaacactttgggaggctaaggcaggcggatcacttgaggttaggagttcaagaacagcctggcccgcatgttgaaacccagtctctactaaaaatacaaaaattagccaggcatggtggtgtgtgcctataatcccagctactcaggaggcttaagcacgagaatcgcttgaacctgggaagcagaggttgtggtgagccaagattatgccactgcactcaagcctgggcgacagacccttactcttaagggtctgtcttcaaaagaaaagaaaagaaaaagatagaatagccaattacattgagacagaaagtagaatgatggttaccaagggttagggggagaaggagtgagagtttctgtttattgggtacagaggtttagtatggtgagatgaaaaagttctggaaatggatagtgtgatggttacacaacactaaattgcacacttagaaatagttaatggtaagtcttacatcgggtatacagtggctggtagtcttaccctctataaatacacactttttggtactgccctttccctcccatgcatctctgtgtgtctccaagtgtgcatcactcactgtcctctgtgctttgtcccatgtgctgtgctcacagcctcatacagccagtgacttcagaaccaggacacagctcaggagtctgccccaaggctccttttcttcccatttttctacatcctcacctaggggaaaactttgcttccactggcagctcagtttagccagattccagacaggccacctgggcaccttcttgacacaccccagccccaccccaggtagagtcagggcaaggccagtcacagctgggagcagagtctcagctactccttcctcatctgaggggctttcttctctcatttgagggaaaaatgtgagcttgtttcaagccttggatgttccctgcagctcaagtgtgggtaaaagtaaacgaaggggtgcacagaaaaggatgtgttggtaaaatagagaagaaacttgaccttgaggaccctccttcttccctctctgtaaagctccttccactacattgggcttggggctgatgaagcctccttcctacgtttctcaggctggacctgagttcatccgtgagaaatcagtaaaacaaaaggaagagtctgtagagatgaattgggaggggtcaggagaaaaatttgggatttgcttgtgcccatgggacacaggctgggaataaaaatgttttcctggttcttctcagaaagccaaatagacttcacctgaaaacctgttgccagtgctccccttaccagtgactgtgatcttcttgatcgtgaaacacctgctgtcagtggctgagttgcgaacgaaacagatgtagattccactattctttttagtgattttggagataaagagctcttgtgctgatttttggaacttcccattaatctgccaagaatactgtgggggtgggttagaggctgtgttgcaggagaggttgaggttttcccctggatggtaataggagtaagagggggaaatgttggggtcgtctgggccatctggagcaaagaaaatagagccaaaagtcatgtcatcagagggaaggaaaagctcctggtctgtggaagagccacagtgtccctctgagccaagtcacaaccctgaagtcccagccaaacccccgctgtggtcactgagccagagtctgagaattcacctgtttctcccattacaagctgtggaccctgaggtctcccatgacaggagcagcccctccccttggattcatggtcaaggctggacctacccaggtttgcctggggcaggaagtcatggccagcctgggtgcccaggagtaaaggtctctgtacttggacctgagagggactgagaggcctggcctctggccatgtggatttgggctggcagcctgggctacagaggaacagaagatactacagaggacattcagggtgactgggtcactgtggttggcactcactagattccggatttcacattcatatgttcctgcgtccttccttgtgactctgggtagagtgagggtcctgttgtcattggacagcttcagcctgggactgaccgggaggctctgaccatttacccaccacaggtaagttgtgttctgaatctcagtttcacaggttaaggccgcagtatcctcattctccacggggttggagttgctgatggtgacgaagggcttggatagtttcgctgtgcagaaaacagaagattgccctgtgtggcaacttttatcgctccatggacactttttgatcagagttggaatttcctgtctctcagcccaattgagtccttgaaagcccatggcaggtgtgtatgtcagaaaacagatgcatggcaatctgagggctcagagaccatgaggccacctgttctgtcttagagaagcatagactttctgaagtgtaaattgagcagcagtgttgggtcatggactgacacatgaccaacagtcacagcccctggtgtctctcctggtttctccctgtccagctgactggctggcccaacttagggtcctcacctggaacgtgcagctgctgggccccttccagcttcagttctactttgccctcctaggtgtgttttctctgtgacttctctttcaagaacatcctagagatgggtgttgatagactttccattgtccttaaaccctgtggatactgggtagcctggcctggaactagatgttttcagcagaaataacacaggggagaccaggggcaagcctgaagatcagtttggtcttcaggcagtggagccacaagtcagggcagttttcctgagatgtttcatagtgactgacttgagccagtgacccctaaagatagaggagagtctaaggaatgatctagaaaaagtgaagagaacagaaaagagctggtagctttggatcagaatcacgttccctgtcctgggtccttgatgctttctctccccctgcaggtgaggaccatgtggatctttctagaaatatatgtagacattcgcaaatgcagaattgactggaggaaaaggggagcataaaatgctggaaatctggccctcatagatcatgtttatttggtggatatgagacagaaatttgggaagaagttttgcaaatgttttctctgattggacattctactctctgattccatgagtttgactaccctagggacctcatataagtggattccagagtacacttctattatgatttgtttttaataaatggggtctggagagagaaaaattatgctttaaaagaaattctatagtacatctgttgttggttgttcttgagttttattctgcagtttggaccaaatcatagattcttagtgggcttcaggttcccaaactaaagctttcaaaactttacctttaaaattgggaattgtactcttcatcctagtagtcattatttaccttatactatgctgttaacttaaatactgaaactgtaaatgagagtactaatgccttggtcatgcaagccttggagctttagcgtggctcacatgagtatgcttagacagctgcaaagtggtttcactcctctcaccttgggatcaactcccattcccactatgtcccctgtcagcaggaagccagagcaattgatgacctttttctatcttcatagcctacaccttaatcttaaagtgtcttaaaactcagaggaagggattgaagatgcctttgcaaagttatgactgaaacagtgaaagagatctaactgaatcaaccccatcttgcttctgacctttaagctgttcgtgttccttcctgggtataggcagaaccactttgggaggaacttggtttatagtttaaaacaagatgataacagctctttccccaaacaaacctccctcttgcctagggactagaatgcctttgtaggactaacaaccacaagattagaaattatggtttaggagtcacacagctggaggctacaagattttgaccctcatgtcagtgcttgaggtattttgcagaccctgcccttggtggatcagctggcaccaaccagatcaataaactggctcatctgaccttgtggcccccatgcaggaactgactcagcacaagaggacagcttcaactttccatgatttcacctctgacccaaccaatcagcactcttgactcacttgccttctcccactcaccaaattatctttaaaatctctgatgcccgaatgctcagagacttatttgagtactaataaaactctggtctcctgcacagccagttctatatgaattactctttctctactgccaatccattgtcttgataaattgtctctgtctaggcagtgggcaaggtgaacccactgggtggttacaaattgagcccatgagctttggggactgcagacctgtgcttctgactctaactccgtggtgagtcagtgtagaaactgaaaccacctttgtaaagattatgacagtgagagcaagctagcatggctgactccatctagcctctagcttcaggctggccatcctcattaattcccaggcataggccaggctaaccatgggaagaatttgtagtttaactttgaagcaatgatgataatagtcccccttaaaatttaccccctccttgctcagggactgcctttgtaaaactaatgaaagaccatgagattaagattattggagggtcccaaattttgctaaaatgtaggcatagtttctgcaattccttactgctcaggactcatgtgtacagaggtcacaagatttatgacttccttaattgcttctatagataacatcactattgtagaacctgagattggtcttttaagatgttcctcagacttttgcattttggcaaccagcataactcatccagacccatgattaatgattcatccattcatgtggcttccatccagaggcagatttaacacaaacagatcattttccccacctgcatgatttcatccccaaccagtcagcagtactcattccttagacctctgcagctgaaactatccttgaaaacctctaatttctgagccactagagaggctaatttgtacaataataaacttctgtcctcctgtttgacagtctttgcctaactaaaatcttttgtaactgcaagtcaccatctcagtaaattggttttgtctgtgcagggtgcaagaggaacccatcaggtgattataagagtggactgaggagttgctcatttctttccagtggcttgtttcatgttttggctcacggaggaagagaaccctggatggggacacagtggaagcttgttctcctggtgatctggggatattggctcatgatggagcctggcaggggtgactgctctggctgatttctgtgcctttcctattgtccaggaggtgggccaggctacagtgtgaataggaagggaacagaacagtcagccttgttagagggagtgtctggggaaggcctacgtgtgggggaagctgtgcagggtgcagtatcgtagctggaatgaagggggaggaaaatgagggacatggaggagcagagacacccatggcagtgagcagtgggggctacagtgacctaaaagacctcaaggtccaggggcccccacttccttagtccaggaccagggagccctggaaacccttctatgcccagggagcctcagtgtcacatgagatggggtggctttaggagtaggggttcatagggatagaacatgggtctcaggccctgaaggacagaaaaccagtgtggacagaaactcctaggattctgtatccagaatcaggtatctaaagaggttatagattattcattccttcattcattccctccctccttcacgagaaagcttctgagtgtgtatgttacattgggcctgtgctgctgcagggtgccagtggggagagaaagctatgacctctcttttatcctcccatgggagtgacaccaacacattgggatacaagatttcaggtccagtgaggggcattaggatctgagggggaggactggatattccttgcactgactttgatcattgaggcaggcaatttagttctggagtaaaaacttatcagttgtccatttgctctcactcctctgaggtctagataagcatgaagaaaggatttgagccaatggatgactgtggggtccccaggacccccaaatccccacttctggtggaggagaggatggggctgtggctgcagccagacctctagtgactctgatctgccacttgtgtttgtgtgaccctggttcagtgactatgcctccctgtgtctcagttttctcccagtcagataagctaaatggcaaatggtctgtggcttgtcatgttgtctgtgaatgaagtttaaattattcacagtcacctgacctaatgcttggcacagaggacgtgttcacacaaacaatgtttattattatttgcctgcatgaaagagcatatctaggcctgatccatgatgaacaagatgctaccaggaacatcttctctcttctgtttctgcccctgaagacattgaattatctacggagtctcttaagtctcccagggcagttggctgatggcctaagaagcttgtccatctgtcctctgcactctgagtctcaggtgaaggactaggctctgtccatgcccagatgaggctctgggtgctgagccctggctgttaaacagctccaggaaccatggcccttgtacagctggtaaacctttgctcccagtcagccctgcccaggaggccacaacctaaccctggcacacattcccgagggtcacatgaagtcaggattctgggaccgggttctggggctgaggcttccagggttgaacttctctaagagaatccccgagggccccccaggccaggccctgacccagttctccaaggaatttctcagggtcatgtccatggggaaggcacggagtgcttggctgagactgttctccacctgctgtgtccctcccatcagactgtccttcctctgcagtgaatgtctgcagggtctggatttggggaaacaattttgatctgcagatgtttgtctcccctgtgtgtgtcctgcactaaatgctcaaaccctaaaatgggacataatgcagagggctacacaggcacagtccaggtctaacagtcctgtgtgtttgaagtagaactgacccccgacacccagaagtcatgaggaatcactcacggtgtacgctgatctgtgcagttactttttcagtcataagatctgcctttaaaatttgcacggtgtaggatcctgagtcattcagggcgatgttccagatctccaggcgtgctttggggtatactgtctcttggccactgtatgcaggccctgggatagttacttcattgtgtattacatatcttgcaattcagtcgtcggcatctattgtttcccctttgtaccagttgtggccaagtatatcctggggcagattgtagacaagtagaacaacctccttctcctctaccgcattagatggcagaacttcaactgtaacttgggcagtggtgggtgggttccagaaggtgaaaagtgaggctaggagagagagagagagcatcagtcaacattgggacctatgtattgggggggaaagatggggccctgtgtcctgagaaggtctcttcacccctcagcctttgagtatgtatgtgtgtgtgtgtcctactgagtcaaggttagcagcatgatccccattccttcaacatctctgaccttggcattttcctgtttggaatcctcttccccaggggtctgctcggccccctccccactgccctcaggtcctgctcacatcaggcatccttgggagactcttcccctgacacctcctctagagaccctgggtcttcccttgctgacctttccctgttctgtttactccacaactcctgtcaacacctgacctcacattctagatctctttgcatgtctgtcttccttcccatgaaagcatgagctctgtgagagcagggtcttgtgtgatcttggttgcacctcagttcctgggacaggctgcagactcctgtggatgagctcatgagcgttcccaaggtcttccatgtcctggaccaatttctgaggttggaggctgaggataatgtttcatgccctggttatgtttttatttgaagtgtcatctgatatagttattattatcatttttcaaaatttagtggccagtgatgattaaccaggaaaacagaatacttaagattttcctacctcttaccagttccagttttatatgattttcctgttgtgacccctgttcctctctggtgtcctctcccgtatccaggctccaacagaagccctcagtccccgctcagagctctgtcctccccaggagaccccagccagtcactctgcttcctccttgtgttcactcccagaaagttctctcttcacctgtgagcaggagcccctgtcaggggatgcgctgtgtgcagggaggggctgagaggggcctcatggcttgtgctgcctgtgtgttctcttctgtggaggtgagcctgggatccggaaactttctgagcatggttgtcagctgtgctgtgcttcctccttctgcgctgagcctcttcccagggcaggagcgcctctcaggctcatggttggggtctgtgcccaggacacctctctgtcccctcccctctcagtcctgcctccctgtctcttttctacctttctcttctgtctgtgtttcaggcccctgggaattgctgaggcctctgcctccttcagcagtgattctctcacccaacctctacacatgctatgtgcagacacacagacacacacacaaagagacacacagatacacatagtcacacagaaaccctgtagtttgggtgagcccagttctgggtcctcagcatccagccatgtttatggctccaggtcagcctgcacagttaccccttctgccctcttccatccccacctggctcttccgttcagagcaggaggcttggactgcaccagggccctgtcacagggatctaccctcactgtgctttgggtgagctgagtgctggctggtgagagggaccctttttctcattgtgtcaatattggctacagtttccaaggatggacattcaatgacccgggtgtcccagaagagactgtccttcctggaggtgtgcaggatgaatctctcatgccttctgggaagagaggcctctgctggttggtcagtgggggctgtggtcccaggaactggtctcagccactctcttgcaccctgggttctggttgctgagctggggctgaggcccattcatgttttctctgactatctttggtgtcccgtcatctgcccagctgactgtcctgtggtcactccaccttccccaaggctgatgcagcagggagtagggggctgcccagggacttcacaggacatggctctctgagacccaggacagagaacctgggacagagcaggggctcagagctgaagacattcaatctgacttactctgtggccaggatgggctcagccctccctgtgctgacattccctggggtctgtcctgagggttttgaccttgtcaaggccctcagtgtagaggaagaacaggcagtggcagcagaccccatgtgggggtcactgctcacacctgagagggcagatggggtggaattttgggatggattcatatttaaggaatgatccaacagtagacaattttgaaaatgtacagaaattcctatgctataagtttattctgcataaggtattttttcttaataagataattgacttttcattcatagatagctaatatggcctaaaatggtgagaacatcagagtggactgtttggtgtcttgtggtgtggtttcatgctttatttctcccaccccatatctacagaattctccatattccgttttgtaatgtaactcagtgggtgtcattctggtttgtggttacagaccattggaaaacccgtaccctctctgctgcgaggtacaggcagcaatgtggcatcagctctaaacatgctttctcccgtgacatcaaattgctgattaagtaaaagtcatttcaacagatactgaagatgtcagttgtacccctcacatactcacaattctttcaccaagagatgaaggattttactggtgagttgctttgagaggttagtgtagatctgattctgtcagggccacttttgccctctgagtgggcatttggcaaagtctggagaaattgttggttgacagaactgggggagggagtcctgtggcattgagtgggtagagttcccagagggtgctgaacaccctgctgctcacagagccccattagcatgaccacccctgtgtcaatgctgaggagtgcagaaccctgctgtgcccttctttagcttccctgggtcttccccagacctgatcctttcatctttctggactgctttcccatctcagctccctccttgcaccttagttccctccatctgaactcacacttagtccaaggccagccctgatctctcaactctcttggcccctttttgctccttagcaggagggaaccactagagggcaccctcaccattcctggagctcatgccctccctttcaattttgagacaaatatggctgcttttactgtcacaactccagccctccgcattctttagctttactcaggcagcagcacctggacaggcatcatggaccccagggaggactgtcactctggagattttggtggcatggactggagacctgaagccaccccaaggcccaagtcactggggagaggctgggtccaggtgagggagcttcacacttggtccagatgcccctgcctagtgtgggcactggggacatgtccatttgtctgtgtccctaaaggtcctgtcactcaggatctgtgcctgagggctttgacagagctgctgtggagctttccacatggggcctttcccagtggagcacgagtcctcccagggatttcaaggagggccgttgcctggaagaatcagaaggaatgtggcagccaccaggtgcaggctcctctcagggcctgaaaaaagggacctcttttcatcatttgccactcatgtctgcactgtctgcatcaggatggaatgatgtggaatttcatgcaaggtcattttgcttctgttctgctaataattttttttctagttaatcttttgaagtaaaggcaattgttgacttttgggtgttaaactcacctttcatttttggggaacaaactcaatgtggtaaatcctgacttttttggggtcatatttcatttgtggattttccctctctgttcccaagtagggcatgcagttttactttttcattgcatgatattcacctccctgtgtccatgtgttctcattgttcaactcccacttatgagtgagaacatgcggtgattcgttttctgttcctgtgttagtttgctgagaatgatggtttccagcttcatccatgtctcttcaaaggacatgaactcatctttttttatggatgcgtagtatttcatggtgtatatgtgccacattttctttatccagtctatcattgatgggcatttgggcatttgggttggtttcaagtctttgctattgagagtagtgcagcaataaacatatgtgtgcatgtgtctttatagtagaatgatttataatcctttgggtatatacccagtaatgggactgctgggtcaaatggtatttctggttctagatccttgaggaatcgccacaccatcttccacaatggttgagctaatttacactcccaccaacagtgtaaaagcattcctatttctccacatcctctccagcatctcttgtttcctgactttttaatgattaccattctaactggtgtgaaatggtatctcattgtggttttgatttacattcctttaatgaccagtgatgatgggatttttttcatatgtttgctggctgcataaatgtcttctttttagaagtgtctgttcgtatcctttgcccactttttgatggggttgtttgatttttttcttgtaatttgtttaagttctgtgtagattctggatattagccctttgtcagatggatagattgcaaaacttttctcctattctgtaggttgcctcttcactctgatgatagtttcttttgctgtgcagaagctctttagtttaattagatccaattggtcaattttggcttttgttgccattgcttttggtgatttagtcatgaagtctttgcccatgcctatgtcctgaatggtattgcctaggttttcttcttgggtttttacggttttaggtcttacgtttaagtctttaatccagcttgagttaatttttgtataagatgtaagggaggggtccagtttcagttttctgcatatggccagccagttttcccaataccatttattaaataggagctttcaaccctgccacagctgcgtttatacccattctttctcactgctaacgcagtttatttcttcttcttctattgctttgttgatgaattagtccagaagtttaaataaccttttgaatgctttgggtttttaaatttgtcttctagtttattattttctacctttaagtttcttacacttttattctacttgctttgtttttcactcacttcttatttggatgattaactcatttttaatcaatgttttcagtggaagcattttgggttgtgaattccctggggcatcactgtggctgcatcttacgacttttggtagatgtagctgttagtcaagtaccaggtacttaatatgttcatcactgtgtcttgattgacccgtgctttgaaaatccccagatgtctaatttttctaatttctaaaatttatgttatagcgattacatctagatcgaactgtatacaaaatatgtgcttgagtaaaaattattcaataatatctgctaatatatgagtaagcccagtcttcataaatgttccttgtggacttgaagagaacgtctatggtgcagggtatttggctgtagtgtgccatcgtcattgcctgttgattgtgtggttgaaatgtgtatcatttgtagagattaggcatgttccttgagtactgacaaagtctttaaagtgacttattgtggacaacatggacattcacagtgttaggtggataactagcaactgtcttgaacagaacaacatattcctggacatgttccaaatgaataaaacttaaatgtcaaatcaaagccaccaaagcacctcaaagtggggaaggactttgttattgtatagccaaggaagaaaagattgatacccatgaaaatttcgaaaagagtcttcacgtcaaaaaattctctttaaggaaaacaaatactatcttaaactatttgccattataataaacaggtaatgtgctattatataaaggatactcaaaattaacaagactaaagaatagcagaaggcaaatatatgaaaatcagttcacagaagaaatgttaatgctcactgttttcaagatcatgatgtttatttaacatattagagttcctagcctgaagcaataagaaatgaaagataaatcagtggtatgaggattaaaaaactagaaataaaaccatcattaatttcaaagaataacattgtttatatagaaagattcaaaatagtctaatggaaataattagaaataataagagagtttagggagctgagtagtataagaatagactaaaatatgttaatttaacaacaaacaactagatagtgtaattaaagagaacataatagtgccagagaatataaaatatttaggaatcaattcaaccaaaaccaaaatgcacacaatctcttcagacaaaattatagcaatcaagaaacactaaagcaggccttactaaatggagaactataccatatttatgcatcagaaaaataaattttctaaagatatcaattctgtttgaattgatgtattgattacatataaataggttcaccacattgattacaaatctctgaggccaaaaagttgtaaaactttccttttgtctcaacatttattttagattcagagggtgcatgtgcaggtttgttccctgggtatattgtgtgatgctgaggtttggggtacaaatggtgctctcatccaggtattgtgcatagcactgaacatttcgtttttcatttcttgcctgctttcttccctccccctttagtagttcctagcttctcctgttgccatttttaaaaaaaaattatttatttatttatttatttattgatcattcttgggtgtttctcgcagagggggatttggcagggccataggacaacagtggagggaaggtcagcagataaataagtgaacaaaggtctctggttttcttaggcagaggaccctgcggccttccgcagtgtttgtgtccctgggtacttgagattagggagtggtgatgactcttaaagagcatgctgacttcaagcatctgtttaacaaagcacatcttgcaccgcccttaatccattcaatcctgagtggacacagcacatgtttcagagagcacagggttgggggtaaggtcatagatcaacagcatcccaaggcagaagaacttttcttagtacagaataaaatgaagtctcccatgtctacttctttctacacagacacagcaacaacctgatttctctatcttttccccacctttcccccttttctactccacaaaaccgccatcgtcatcatggcctgttctcaatgagctgttgggtacacctcccagacggggtggtggccgggcagaggggctcctcacttcccagaaggggcggccaggcagaggcgccccccacctcccggacggggcggctggccgggcgggggctgaccccccacctccctcccggacggggcggctggccgggcaggggctgaccccccacctccctcccggatggggcggctggccgcgcggggggctgactcccccacctccctcccggacggggcagctggccgggcgggggctgaccccccacctcccttgcggacggggcggctggccgggcgggggctgccccccacctccctcccggacggggtggctgccgggcggagacgctcctcacttcccagacggggcggctgccgggtggaggggctcctcacttctcagacggggcggctgccaggcagagggtctcctcacttctcagatggggcggctgctgggcggaggggctcctcacttctcagacggggcggctgccaggcggaggggctccttacttctcagacggggcggctgccgggcggaggggctcctcacttctcagacagggtggccgggcagagacgctcctcacctcccagacggggtcgcagccgggcagaggcactcctcacatcccagatggggcggcggggcagaggcgctccccacatctcagacgatgggcggcagggcagagatgcttctcacttcctagatgggatggcggccaggaagaggcgctcctcacttcccagactgggcagccaggcagaggggctcctcacatcctagacgatgggcggccaggcagagacgctcctcacttcccagacggggtggcggccgggcagaggctgcaatctcggcactttgggaggccaaggcaggcggctgggaggtggaggttgtagcaagccgagatcaccattgagcactgagtgaacgagactccgtctgcaatcctggcacctcgggaggccgaggctggcggatcactcgcggctaggagctggagaccagcccggccaacacagagaaaccccgtctccaccaaaaaaatacgaaaaccagtcaggcgtggtggcgcgcgcctgcaatcgcaggcacttggcaggctgaggcaggagaatcaggcagggaggttgcagtgagccgagatggcagcagtacagtccagcttcggctgggcatcagagggagaccgtggaaagagagggagagggagaccgtggggaggtggagaggcagagggggtgttgccattttttatgtcattgaataccctatgtttagctccctcttatcaggttatggtttttagatttttcttccggtgttaatttgcttaggataatggtctccagctgtgaacatattgctgcaaaggaatgatttttttttcttttttaatgggtgcctagtattccatggtgtgtaggtagggattccttatctaatctactcttgatggacacctagattgatttaatgactcttagacatatgaacacaactcagcctcctatacacaggagaaatgaaatttgaggtccagggacagcaaatgttaaaatacaacctcagcctcaaatgtccccaaatacacatgtttgatcacataatgtgtgggagcaactgaggtgatagcaccatcccctacttttcttggaaacataaacattggtacacaccttgtggagtaaaatttctaaatgcatgtcaaaatttaaaatatatttctctttgcctcccaaacttcactgggaagaatttattacatttgcagtaatgaaaaatgacacctaatcatagttattcactgtagtgatggtttcacagcaaaatattgagaagaacctagattttacaccagtataatgctaattaaacaggttattttatatctacacaatggaatatgatacggctgtataaaaagtagaaaatcttttggctattcatatggaaacacctccatgttctgttctgattgtagcatataaacaacctaaaatgtgatgcattttttgaactagatcttatcttaaaatgttatctttatttattttttcagacagggtcttgctctcccacccaggctgaatttgcagtggtgtgattatagcttactgtggctttgatttcctaggctgaagtgatcctcccaactcccccttctgagtagctgggaccacagtatgtgctattatgcccatataattttgtgttttgtttgtttttgtagagatagggtttcaccatattgcccaggctcgtcttgaactcctgggctcaagtgatccaccagcgttggcctcccaaaatgctggaattacaagcttgagccactacatctggccctgcattcttttttttatgggacagcagtctactcactcattactttccctatcaggggaatttttttttttttttttttttttttttgttgagacggagttttgctctgtcgcccaggctggtgtgtagtggcgcaatctcggctcactgcaaactctgcctcccaggttcacaccattctcctgcctcagcctccccagcagctgggactacaggtgcacaccgccatgcccagctaattttttgtatttttagtagagacggggtttcacggcgttagccaggatggtctcgatctcctgacctcgtgatccgcctgtctcagcctcccaaagtgctgggattacaggtgtgagccactgtgcccagcctcatcaggggatttttaacctttccatttctctactgtgggtccatgccaatgtccagatgtatttatttgtctagaattggatgttcttgtaaaaagagcggtcgaaggaatggcctcctagctgatttccaggattctaatcttcatggtctaagctgtaggtttccaaacatggatactggttagagtcaccataaggcatctaaaacctacccatgcatgtgacttcccctaagaatgtctgatttgattggtgtgtggtatgtcctgggcactggtttttaaaaaatgcttccaagaaaaatggtaattttgcagtggagcaatcttagcccagtgctcaaaattaacatccccagtaatcagtgacatggacatcttagggcatcctaatatgatggatgaataacgcgcagcatcacctctgtggtattcttgcccaaagtgcataacctgagtttaattatgagaaaaaattagaaaagcctaaactgagggttattctacaaaataactcgccaatactcttcaaaaatgttaaggtcatgaactctaaagaaattttcggcactatcccagattaaaggagactgagaggacagaacaaagagatgcaatttgtgatcctaaattggatcatggtccagaaaaaggacatcagtgggaagatagggaagatttgaataaggtctatagattcattaattgtgcagtgtcagagatcatttattattttgatgattgggtagatatctataatgttaatatttggggaagttgaatgaaaagcatttgaggactctgactatttttgggatatttttgaaagtttgaatgtatttcaaaatagaaaaaggaaaaaaaggagaagaaatcttccagatattttcatcaagttgccagagtttaagaccatttcccaagttatcttgcctaattgtcagaataatcttcctgggaatgttgtttatcatatttgtgtccttttcaaagatttccagtgacttctcttatctacaggatgaagttcccattccttatcctgccattcaaagccctcatagaatggccccttgatcaatctacttctttgatctgcattgaaggaccacattttactttatcatgtctaaacattttccaattcttttccttgttaatatagcacccttgcctgtcttctcagtctcttgagttgttctttgtcccaaggcccacttcagactctgtctcttcattgaatcctgtatggtcatttctattagaagcagctaactttccacactttgaattctggtagatataatggtgtggagtgaaacgtgagttttattttattattattatattttagaaaaaaagccaatttagtatgcttattaaaagttttccttttttagggcaggcatgatggctcacgcctgtaatcccagcactttgggaggccgaggtgggtggatgacttgaggtcaggtgtttgagacaagcctagcccacatggtggtaccctgcctccacaaaaaagtataaaaattagctgggcatggtggtccacacctgtaatcctagctactctggaggctgaggtaggagaattgcttgaacccggaagacagaggttgtagggagccaagatcgtgccactacacttcagcctgggtgacacagtgggtgagactccatctcacaaaaaaaaaaaaaggaaaaaaggtttcctttgtaaaaaaaatttttaaattttaattggagaaggattagagattaaattgatgtttgaatttcatagggattaaaaaaatttttattttaggttcagggttacatgtgcaggtttgttatgtaggtaaacccatgtcacagggatttgatatacagattatttcatcactcaggtactaagcctagtaaccaatagtaatttttttctgctcctctccctcctttcaccctccaccctctggtagcctccagtgtctgttgtttccctttgtgttcatgtattctcatcatttagctcagacatataagtgagcatgtactattcggcttcttttcccacattagtttgctaaggttaatatcctgtagctctatccatgttcctgcaaaggacatgatcttattcttttttatggctgcatagtattccatggtgtatatgtaccacatataaaagtacagtctttcattgttgggcatttaggttgattccataccttttctattgtgaatagtgttgcagtgaacatttgtgtgcatgtgtctttatggtagaataatttatattcctctgggtatataccaagtaatgagattgctgggtcaaatggtagttctgtttttaactatttgaagaattgccacactgcttcccacagtggttgaactagttgaaattcccaccaacagtgtataaacgttcccttttctccacaaccttgacagcatgttatcttttgcattttttataatagacattctgactggtgtgagattgtatctcattgtggttttgatgtgcatttctctactgatcagtgatattgggctttttttcatatgctgttggccacatgtgtgtcttttttgagaagtgtctgttcatatcttttgtctactttctactggttgttttattctttttaatttgtgtaagttcctcatagctgatagatattagacctttatcagatgcagtttgcaaatagtttctcccattctgtacattgtttattctgttgatagtttcttttgctaaaagcagaagttttagattcagaaataagtgagtctgagttttgtttccaatttttatcaggtctgatataagggacaatttattgatgtctttggatagaaggataatagtgcctactgaaagggtcattgtgaacattggatgaggtgcaaacataaaggttcccagcacatagtagcttccttcctcatcatttttgtagcccagtggtccccaaatgtgttgtgggtgctgtgaagactcttatcaaattttttttgtagagcttttaaaaaatatttgtacctggccatcactaagatgaccttgaactgaactgagtgcttagggctttaaggagttcaattgagatttgtttttccaagaacacaacaaactaaataagtgatctatggacaggaatgtaacccaatggaggaaaaagggaaggtcaatgggattctaaatgagagatagctgtgatgctttctgcacccattcctttgctctcagtcagacagcgttaaggaagtacaacttttaaaattatgtaagagaagacaaaaatctcaggactttcaaactcattacaccaaagggatagttcagcctggagactgagtcatgcaatgctaccatctttttacccagtgaacaactgttaatttacaatcttgtgtgaaagcagtgttcaatagccagacccctacaagaagacctcaggcatctctggatgactgtcctcaaattgtcctttggtgaccttgaagcctttcaagatgtatatccatccataaaacaaagacacatcaattgtaactttaggtgtgcaatctaagtccagcttctaaaatgaaagcctgttagatttcacactgataatgcttatctttctaagtacagaagaaagacaagatgagaccaattattctttactatacttgtcccttcctacctgccttgccccctttaaggagatgtataaataccaggcctcctaaaaacctttttcagagagaacttaagacatggagggtttctatgatttgtgtttttccagggtgtgccctcaagctctggcttaagaaacctcaattgattcagacacttgcctcagtcactcattatggttaacattctggtgaccattaagggatactctgagtggagttttgctcccatgttttgtgttatcaaaaatgtggatatggggacatttgaggccacagaattttactttaacatttgctgtcccaggacatcaacttccgtttctcttctgtataggagggtgttttgttcacaagtctcagagctattaaatcaacccagctgtccatcaacagtggattagatgatgaaatccatacctatgctccatggaatactaggcagccataaaaaaagaaaaaaaatcatttccttcccagtactatgtttgcagctggaggccattatcctaagcaaataacaaaggaagagaaaaccataaaccataacctagtaagtgagaacaaatattggatattgagggacataaaaatggcaaaaagagaagctaggaactactagaggggagaagcaaggaagggagtaagaaatgaaaaactaagtgttgagtgctatgcgcaatatctgggtgagaggattattcatacccctaacctcagcattatgcagtatacccaggggataggtgtgcacatgtaacctctgaatctaaaataaaagttgaagaataaagagaaaagttttacaagtttacagtctcaagaactttgtaatcaatgctgtgaaactacttatatttattcaaaagatctacttggatggaattgatatctttagaatacttattttttcggatccatgagtatggtatatttctctatttaggccttctttaatgtctgttgattgttataattttgtctgaagagattgcagtgattttggtctttggttggattgagtcctaaatattttatattttctgacactattgtattccctttacactatctagctgcctgttttttctatacagaaattaatatattttagtctattcttatagtactcagctccctaaactctcttatttctacttttttattagtctttaggatttttctatataaacaatgctattctctgaaaataatgacagttttatttctacttttccgacctttgtacctcttatttgtcatttatttcttactgcttttgggtaggaactccaatacagtgttaaataaaagttatcactgaaaaaaatgagaatgaacatttttttctgtgaactattatatatttaccctcttttctgctacattttggttatattaattttatgtgttctttatatatgagcttattatctgtttattataattgcaagatattatttgcttttcttacagagaatttttccacatgaacactctttttgaaaggttcaggtatatcaatatttctttcttggctacacaatgagaaagtctttcttcaccttggggtggtttagtggctttgatttggcttcaatttttatccatttggaacatgtccagtaatatgttgtcctgttcaagatggttaccagttatccatctaacactgtgaatgtccatgttgttcacaataagtcacttaaaagactttgtcagtactctagcaaaaattcataatctctacaagaatatgcatttgaaccacacaatcaacaggcagcaagaatagcacactacgtccatatgccctgcaccatagatgttctcttcaagtccacatggaacatttatgaagactgaactaagtcatatattagcaaatattaatattaatataaatattaatagcattgaatcatttttacccaatcacctatttagtatactgtgcaatgtgggtactattctctaaaacatgaattttaaatattaggcatttggagattttaaaagcacatgtcaatcaagacacagtgatgaacattcaaatacttggtacttgactgacagttcatttgccaaaactcgtaagatgcagccacagtggagccccagggaattcatgacccaaaaggcttatactagaaaagattgattaaagatgagttaatcctcaccttaagaagggagagaaaaacaaagcaaggagaataaaacttataagaaacctaaaagtagaaaacaataagctagaagacaaattaaaaaaaaacaagaacatgaatagacccaaaaataatgttgttgaaaaagataagttatttaaacttctggactaattcattaacaaaacaataaagaaagaaaaaagaaacagatttagcagtgagagagagtggatgtaatctcatctgcggcagaagttgaaagtttcttttcaaaatttcacaacactaagttaattgataatttaaacaaaattgacaagttcctagaaaattaggtataataaaaagtagcacaggaataaatggaaattctgacctgtcctataactatgtttaaaaaaatttcttttgtgtgtgtgacagggcctcattcctgtttctccagttggagtgtagtggtgcaatcatggatcactgcaacctcaacctcccaggctcaagtgatcctaccacctcagcctcataaggagctgggaccacaggtgcatgccaccatggctggctatttttttctatttttagtagagacagggattcatcatactgcccaggcttgtctggacctcttaggctcaagttcttccttggcctttgaaagtcctgagattacaggtgtgagccaccatacccggccccaatcttgaaattttacttaatattttaaatattcacaaacatacacaaacacacatacatacatgtggatactcagaaaaagcagatgactttgggatgatgatgaatatttctacagtggaaaaaaataaatctacatctgtaattcacaccacatgctaatcttttttttttttgagatggagtcttgctctgtcacccagtctggagtgcagtggtgtgatctcggctcactgcaagctctgcctcccaggttcacaccattctcctgcctcagcctcctgagtagctgggactacaggtgcccgctaccatgcccagctactgttttttgtatttttagcagagacagggtttcactgtattagccaggatggtctcgatctcctgacctcgtgattcacccgcctcggcctcccaaagtgctgggattacaggcatgagccgccgtgcccagccgataatcttttcacaataaaattattgagaatattcttcaaaaggctcctaattttcttcgtttcttctacatacacaagacatacagagacagatctgtgtatctactatacaacaaagaagccatagccaaggtacatatgaaaatccaacagaaacagtaagaggaagattgataacacaatgtttttaaatggcggaaaactcttaagaggcaccagatggtagaacatgtgtaatggcctgtgagtacatgaaaagatgcatttgcactattgtttacttaggaaaagcatattaaaaccattttgaaatctcatcccaaccacagaagaaaggctaaaattcaatgggctgacaatcccaagagttggaacaactctacagagagatgttgctggtgggaatttagatgtgttcagctctctaacaagagaatctataatttgtagctatcttagaagatgtcccagcatatacaatggtctctacacccaaggaaataaatgagaccaccaaaatacatgtgtagatatgtccacattaacatgattcagaagacacaaatagtgttgcagtttgaatgtgtaacactacaggggataaaactgtggtgcattcaaactaacggatatttacaacatgaaaaataaatggattcctgctgcataaatcatggatgatctcacacaaagagttgcaagagaagagccagtgcagaggggaaaatgaagactgattccacctctataaagttcccaagaggcaaaacctatctgtagtgctagagatcagaatggaggtaacctggcacttggaatggctaggtttggggaggggaggtcatgaagcctgtcacctggacactctgtgtgagtacacgggcaacacccattacatctccacacacagctctggtcatcaggcatttttagggggactctagcaagggattaggaatcatgcatgagaatcatctacagagagaaacatagagttggaggagctggttgctaacgcagagcagggtccctgttgttcacaggtctagcctagtcttaagttcccagccccactcccactcctgccatgatccaggaacctctgaaaagcagctttttccaaggacctcctccttggtaacacatcaaggtttctcactgtcaagctgtccagaaagaaaagcaacttggatagtgcccataacatctgcgccctggggctcagggctcagcagaaatggcagagggcagtgagaggagacatggtgaatggggtagggacctagggacagctgcctggaacaggagcaggtggggccacaggagaaggtggcacaggaaggaatgggcaggagaggagaggagaggaggagacaggctctgtggggctatagcccagtgtgagcctttgtgaggctatctcagcagggaaggccaggtggtgtgaacaggaggagaagcaactcccacctcccctgctaggaactgaatgtgtacactcccaaattttgaaggtttcatttttaatgtgaaggtggtggaggtggtgccaggcatggtggctcacgcctgtaatcccagcactttgggaggtcgaggcaggcagatcacctgaggtcaggagttcaagaccagcctggccaacatggcaaaaccccatctctactaaaaatacaaaaattagctgagtgtggtggcgggtgcctgtaattccagctacttgggaggctgaggcaggagaaatgcttgaacctgggaggctgatgttgcagtgagccgagattacgctactacgctccagcctgggtgacacagtgagattccatctcaaaaaaaaaaaaaaaatttggaggtggggcctttgggagataattagaataagagtcagtcataaaggtaggagcttcatgatggaattaatgcccctataaaaagtggaagacacaggaaaatgatctctctctctccttttttctgtccctccaccccctcccaaccctccaccatgtgcagatacagcaagaaagcagcatctgcaagaaagccctcaccaggaccaaatcagctgacacctcaaccttggactacccagcttcccgaactgtgaggtatagatttttattgtttaagtcaccaaggctacggtgtttttaatagcagcccaagcccaggaatacatcatctgactcactattttgaatcaaactcttcagtttctccatcaacttagctggcagctcctgtccccagcagcatcagaggccccatgaaaagagctccagcaggggctcagcctgcatgggtcccatgcggcagcctcagtgtcagagcctggatggcaggtgaggctccagtgacacaaccacaatgtgaaagtgtaagagtttttaactacttatagatactggaaagcacagggcacacctggagaccacagacactggggtcagagagcccaggcagggaggagagaagggaactgtaggccaatggctttattgggtctagggtgttattgacaggtttccagaagggagctttaatgggtgtgtttaaagcaggcaaacactggggcaagaagatcacactgtgactgagaggtggtcactttaaattggagggcgaatgtcacaactgtttcagtttaaaggaagcagctggcgagaggggagcccagcacactatgcaagagagatgcctctaagattttatctgtggccaccgactggagccatttggaccgggtacagcagtggaaactctgtgatggtgacaaacatgggaatcactctgatgtgacgcagttaaatttacaccttaaaaaatggatgccaagacaacataaacaagacccagggacaccaacagggtatggtgctgtgccccagagtcagggtcctgggttcttacccagggaagtgagaaataaagataacttttccctgctccctctctcctcccctgacactgatcttcccaccctgtacctccctcttctgctcccaaacccccacccagtgctcagtcgcagacatcactgcctgcagggcatgcacagtgcagcccattgcacacaaactacaaactcacagaaggtgatgacaatttgtgtttgggacgtctgattgtgaaagagggaggacagcgtacttgcagccacagagactgaaactggaacgtgatggaacggggctggaacgtgatggagctctgacataacagacgtgtgactttgtgtgaaatgtgcagatccatgtggaataaaacacagcctagcctgtggctgctgccgtccacatttccctcatcttccaacagaagtcagcagggtccctcccagcctggaacctccctagagactgctgacctcccttggcagggcccacaggccagcagggtccgccctcaccagggtcacttggcccatgtcctccttgctcctccaagctccccacccaagtctgtcagcttttccctgcagcccagcggccacccacctgaggccactctctctgcaggcagctcctgcccccacaccccatttttcctggggcagtgctggtgcatgtgatgccacactgggcactttcccatcgtgacctccttccatcctcatcaactccttctgtgactgctccctaaatgcctgcccctgctccatctttcctgttctctggggcattccaggcttccagaacagcatctgcctgagtgcccacagtaccaatgggaatcaaccagacaccctgtaacctgccctctgcaccctaggaggctcagagcacatgtgacggtcacacacaggcaccatctgggatttgtccacctgtcccctgctgtccctcatgaagtcaggagggaggacagagctctccggtgtgtatggggtggggagtaagcatgagctccctgggttagaacacaacccaccttcacccgccctcttaggtgtgagcaccgtcctcccagatgggctatctgaccactacctgtgcttcctctacacaaaggggcttgaccaggtccaaatcctcaggacagaccccaggagatgtcaacatgaaaagggctgagcacatcctggcttcagagtaagtcgggactagtgtctccagctcagagcccctgctatgtcccaagctacctctcctaggtctcagagagctgtgtcctacagggtccctgggcagctccccactccttgctctgccagccatggggaaggtggggtgaccacaggacaatcagccatgcagaggacagaggacacccaagatggtcagggaggacatggaggagcctgaaccccagctcagccaccagactccagggagcaagagagtggctgagacttgtccctggtgaccacgaggttcacagcccccagtgaataaccagcacaggcctctcctcccaggagacataagagattaaccctgtacacctccaggaaggacagttccctctggaacactagggtcctgaaagtttatccttggaagctgcaggaagcttgacacaattagagaaagggagggtccttctcgctagccagcactcagctcacccaaagcacagtaggggtgtcctcgtgacagggtcctggtgcagcctgtcctcctgctctgaagggaagagacagatggggatgggagagggcagggggagtgactgtgcaccccaacttggagccatgaaaatggctgaatgctgagggtccagggctgggctcacccagcctacaaagtgtgtgtgactgtgagtgtctgtgtctctgtgtgt

SEQ ID NO: 329 - DNA, 130683 bp, Homo sapiens
  source 1..130683: mol_type = genomic DNA
gagttcagacgtgagggaagaagctgacatgcccgatgggagggctgaggcccgtgattccgtttatatgaagggtcccgaacagggacccacagaggcatgagatggattccctggggctagaggctctgtctggaagatggaaatgggctggatggaggggaggtggatgcacggcctcgggagcgcactccacaccacaaactgttcgcttaatgacggccctggtccacttcatgctgtgtgacttgaccccacatgccctgtgaccccacccccaggtcccctgggaagtcacagctgccatccccaacggaggatgagggtgtctgctccagggctcttgcaggcccttcccgtggtcccaggacagtgctgcggagtctctgggctgtgggtcccatgaacggggtgcccagtcactactgctgtgggctcctgccctgccccccttgaccaggacctgcagccccactacggggtccccgggagaccagtggtgcacagctgccctgggacaagaggagcctggagcggggtgaaggagcccgggaggaggggctgtgggattcgggacccactacggggaggacagccgcacgggagggttccgggcagggggcatggagggctgttggctcctcaggtctcccccttgcagaggctgggcaggggcaccccgtggcaccagcctttcccaggcgatgggtccctcgggttcccacaactgccgctgcctgagatgtccgcccctgagctgtgccacagggctgggccccaccaacagcagagtccctgggacagccccccgggaagggccgcccaggcccctgtggccgacagctccgcgtggtcgctccggcagacttgctggctcctggtgcgtccctctgaggccctgtctgtccctccacagacacagggcgccctgtttccccgggagctggaacacgggccctctgttggcacctgggctggctgtcccccccgggcaggccgagggggggctccacacagacccacactgtgcctaccgcagccgccctcctcggcctgaaccaccgtgttgtccccactggggccccccacagtggctcagccgtgggcatcatggctccaggtgccgtggatggaggcagggggaaggggtgggtgggggaaccgcccccccaggctgggggagaggggagggcctctgtcctatggtggggcccacttctgacttctcccaggacccagcctcacagcgtcctgggtgggggacgttgccccagagctttgcctccttccggcagggctggcacccctgctcattcccatttactccaagtattgccgcagcagacactggaagggtcgccaggcaaagcaccacccattcacctctccatcaagctcccgctcggtcacccgctgccccagcatcagagtgtgggctgggggcacggccaccgccaaggggagggaggtacaagaacttcttcatttaaacagtgtgttttcgagtaagctggtaagtggtataataggaatagtagaagaatatgccatagctatggctcaagaataggaataagaaaaatgtgcagtagacgctgtttgtccgacgatgatgaaagtgtgcacggccggctgtcctccgattgaggggccttgtcaaggcctcagaggcagcgaggtcacagcctggtggagggtctgggtgtgcgctgtgtccatctgcacctcacagacaccagtcatggggggatgaaaccgggccaagaacacatgtgtgcacaggctgtgtgtgcctgcatgtgtgggatgcgtgtaggctgtggcgggggtggagatgagggataggacagaaaatggcccatccaaccccacatcctggccgggcgtgtccaggtccctgtggggcgagggtttggctgccccagacgtgacagggacttggctctgagggtcaggacctggctgggaacacaccattgaagagggaacagaaaccaggccctgggacgctagagaccccaagagctacctggctgggtctatggtcagggctgtagtggaggaaggtgtcaggatggccattgtctcaactcctgtgggcggcacagccccaggctgggcctctgggaggagggtgggatggatgggagatcagagcccctggcgcctgggacaagggttggcctggatgtggggccccaggtgggcagggcctgggagccgccacagtatgtgacaacagaccccaccctggacccccgtgctgggggctgggtcccaccgctctcctctccacgtctctcttggcgatgcccagcttgggctgggcgcagggaagggcaaacgttgctgagccgccgaggggctgggtcttcgcctttatttctggtgcacgtctagaggggcccgggcagaggccacccacggtccctgaagtagggcctcagctcctccaggctgagcggagggaagtaggctccgatcctcttccgcacccaccacttgccctcggcggcgtgcctgcccccaggacggctgaacttgtacctgtagtgctctcctcggacccacctgcaagggggcacatgtcagcccagggcctgctgggactcccggcccccgacccggctcctcagcctgctgctgagctgcagctgctcacagggtcccccacggacagaggggctgcatgaggagcccccaccctgagcacaggtagacccccagcagaccccgggcagggcaactgttccagtcggcaccctcagcagtgaacagcgcagcaagggggaagggcggacggggggcagctccgggaggggagacccagcagggcccacttggcagagggaccggcccggggaaggccaggagcttcacgggtggcactgagcaagcctgagaccgttcacaaggccccagtttgagccccaagtgtcccccgcctgggaaggtggggagaggaacctactgctcatggtgtggcgtctccaccatcaggccagtcctggcgcaaggtgcctgggggtttcggtccacggggcagtccgaggctgtgagggagccaggccgggacctgtttcctgagggcggagcctctgcttcccagggcttcaggcccttccctgcctgagacgtgcagatgctggctggctgctctcctctgtcatgcccgagtgggatgaaggcccccacccccatctcccctggagcagggtagcgggcaggtctctctgctgagccctgtataaggtcccgcctgacccctggtgaccaggcctggtttaggccatactgggtcttggtccctggctggcaagccctcactggactctcggaggactgggcattttctcctgggggtgggacgaagccccctcatgtccagggttgctcggctgccccggaggaggaggcgccaggaggaattgtcaccgtcacaagctcccggccctccaggccccttcgcagttgtgcagcaggagcggaagcttctcagcccacagggcggctgctgcctggctgggatccatggcagagctgggccccagctgcccggtgggtgtgatggtgcagccataacaggaccctctcatggcccctggaatgagcccaggcaggtgccagaggcttcacactgcaccagggcccggtagcgactgtctgggctgctgtcattatttggggcttctggtgacctgcacacagctgtgctctgggggctgggggtggagaccttgggccatgccccttaggctggcagggtgagggcctctgggtccacccggctcctcctggctttgagtctctttgggtctgggtgtgtgatggatgatgattcttctctccccaagtctgaattacgccaggaaaaccgggaagacagagaccctctgggtggaggagggtccctgaggcgcctgatgggagagagggatcagcagctccaagaggagtggggtcgggcctttggaaaacctcccgggcagccaagactgagggtgatgctggcagttggtggctcccgtccactccaggagggcactgcccactgccctgggccccaggggtctttcctggaccccttgggcctgaggctgccatggttttccttggctataaggacggcagcggccagcatggggactgaggccaggtggtgccaggcagagaagtcacactggaccccgaggtcgacctctgagcagctcagcagcagactgaagggacgggctggaatgcggccgtgagggcgctgggctgtgcgggcagcatggtccctgcacactctcctgggccttgctagggcaatgcagtccccaggcaggcccaccctctcccaaaccctgcatttagtgaggccgggagggtggggatcctgggaaggcctcctgcagtgggattgcccatctttcccaaattcctgctcttgctttctgctccttcccaggacagggtcaaggcctagggggcccagggcctggtctctgacatcaagagctggaactgcagtttggaaagggttttggaaagggtcagaaccctctgtgccaactggcaggttggtgggaaggggccccaggccccagcggcctgaagggttgcatttcattcctgcagacaaagtacccgagaaggccatggcaccgccccggagggcttgagagtgttgaaaataggggatctcccagcccttttgaaatagaccctactggcaacagctgggcatcttgcacagctatagtagggattgcagccagggcctgacactgaggccacagacacgggtcccatccacgcccggacccccgtgtccttccacaccctccccgaccttcggcctccttgtgtgatttcaagaacgtatgatttcaagaatgagtggaaccctgcggcacgtacccgcggggcaggcgattctcacgccaattctcaggttccgccaggtcgtgtgatggaggcttccttcctcctcgtcgctgaccggcgtctgcggcgtgagtgcaccctagtttgtgcggtcgctctcttgtggaaggacagctgagctctttgcagtttttgtctgtgacggctgccgtaaacctctgcacgggtttctgcgtgaacctgggtttcaactctctggcttaaacgtccatggaagcagctgctgagtccactgcaacttcgggtgtcctttttgaggagccattttaccctcccagcaacagccgagtgactcgatttcttggtatctttgccagcatgtggggttgttgctacttttattccagccgttttgatgggtgtgcagtggtgtcacgggacgggtgtgagtggtgtctcgggacgggtgtgagtggtgtcaccggacgggtgtgagtggtgtctcgggacgggtgtgagtggtgtcacgggacgggtgtgagtggtgtcacgggacgggtgtgagtggtgtctcgggacgggtgtgagtggtgtcacgggacgggtgtgagtgatgtcacgggacgggtgtgagtggtgtcacgggacgggtgtgagtggtgtcacgggacgggtgtgagtggtgtctcgggacgggtgtgcgtggtgtctcgggacgggtgtgcgtggtgtctcgggacgggtgtgcagtggtgtctcgggacgggtgtgcgtggtgtctcgggatgggtgtgcgtggtgtctcgggatgggtgtgagtggtgtctcgggatgggtgtgagtggtgtctcgggatgggtgtgcgtggtgtcacgggatgggtgtgcagtggtgtctcgggatgggtgtgcgtggtgtctcgggatgggtgtgcgtggtgtctcgggatgggtgtgcgtggtgtctcgggatgggtgtgcgtggtgtctcgggatgggtgtgagtggtgtctcgggatgggtgtgagtggtgtctcgggatgggtgtgcagtggtgtctcgggatgggtgtgagtggtgtctcgggatgggtgtgagtggtgtctcgggatgggtgtgagtggtgtcacgggatgggtgtgagtggtgtctcgggatgggtgtgcgtggtgtcacgggatgggtgtgagtggtgtctcgggatgggtgtgcgtggtgtcacgggatgggtgtgagtggtgtcacgggatgggtgtgcagtggtgtctcgggatgggtgtgcagtggtgtctcgggatgggtgtgcagtggtgtctcgggatgggtgtgagtggtgtctcgggacgggtgtgcagtggtgtctcgggacgggtgtgagtggtgtctcgggacgggtgtgagtggtgtcacgggacgggtgtgagtggtgtcacgggacgggtgtgagtggtgactcgggacgggtgtgcagtggtgactcgggacgggtgtgcgtggtgtctcgggacgggtgtgcagtggtgtctcgggacgggtgtgcagtggtgtctcgggacgggtgtgagtggtgtctcgggacgggtgtgagtggtgtctcgggacgggtgtgcagtggtgtctcgggacgggtgtgcagtggtgtctcgggacgggtgtgagtggtgtcacgggacgggtgtgagtggtgtcacgggacgggtgtgagtggtgtctcgggacgggtgtgagtggtgtctcgggacgggtgtgactggtgtcacgggacgggtgtgcagtggtgtcacgggacgggtgtgagtggtgtctcgggacgggtgtgagtggtgtcacgggacgggtgtgagtggtgtcacgggacgggtgtgagtggtgtctcgggacgggtgtgcagtggtgtctcgggacgggtgtgcagtggtgtcacgggacgggtgtgcagtggtgtcacgggacgggtgtgcagtggtgtcacgggacgggtgtgcagtggtgtcacgggacgcgtgtgcagtggtgtcacgggacgggtgtgagtgatgtcacgggacgggtgtgagtggtgtcacgggacgggtgtgagtggtgtctcgggacgggtgtgcagtgatgtctcgggacgggtgtgcactgatgtcacgggacgggtgtgcagtggtgtctcgggacgggtgtgagtggtgtctcgggacgggtgtgagtggtgtctcgggacgggtgtgcagtggtgtcacgggacgggtgtgcagtggtgtcacgggacgggtgtgagtggtgtctcgggacgggtgtgagtggtgtctcgggacgggtgtgcagtgttgtcacgggacgggtgtgcagtggtgtctcgggacgggtgtgcagtggtgtctcgggatgggtgtgcagtggtgtctcgggaggggtgtgcagtggtgtctcgggacgggtgtgagtggtgtcacgggacgggtgtgagtggtgtctcgggacgggtgtgagtggtgtctcgggacgggtgtgcagtgttgtcacgggacgggtgtgagtggtgtctcgggacgggtgtgcagtgatgtcacgggacgggtgtgcagtggtgtctcgggacgggtgtgcagtggtgtctcgggacgggtgtgcagtggtgtctcgggacgggtgtgcgtggtgtctcgggacgggtgtgcagtggtgtctcgggacgggtgtgcagtggtgtctcgggacgggtgtgcagtggtgtctcgggacgggtgtgcagtggtgtctcgggatgggtgtgagtggtgtctcgggatgggtgtgcagtgatgtcacgagatgggtgtgagtggtgtctcgggatgggtgtgagtggtgtcacgggatgggtgtgcagtggtgtctcgggatgggtgtgagtggtgtctcgggatgggtgtgcagtggtgtcacgggatcggtgtgagtggtgtcacgggatgggtgtgcagtgatggtaccggatgggtgtgcagtggtgttatggtggtttttgcttctctaatgacaggcatttctcctgagcttatctgtcatctgtgcaccttctttggtgaaacgtctctgtgctcattttctaataagattattttagtattaagttatgaaacttctttacatattccagattttagactattgtcagatacgtgacttgcaaatattttctgtctgtagcttaaaaattatctttgttctcttaacaggtctttttatggagcaaatgcttttaattttaatgaatttcaattaatttttcctttcacagatcatctttaagtataatgactctgcctggccctagatcccaaagattttcttctattttttcctgaaagtttttttttttttgagatgggctctcgctctgttgcccaggctggagtgtggtggtgtgatctcggctcactgcaacctctgcctcccaggctcaagtgatcctcccacctcagcctcccgagtagctgggactacaggcatgtgccaccaggccctgctaattttttgtgtttttagtagagacggggttttgccacgttgctcaggctggtctcaaactcctgaggtcaagcaatctgcccaccttggcctcccaaagtgctgggattacagatgtgggccaccatgcctggccctgaaagttgattgtcttatgctttacgttgaagtccaggatccgttttgagttatttttgtgtggggtgagacgtgggtcgaagattttgtttttgtccatggaattgcttttgcgcttttgtaaaaaaaactcatccgggcatgtttgtttgggtctctttgtgggttctctgttgtgttccatggaattacatgtctgtccctctgtcaatactacactgtgttgactactgtagttctgtgtcttgaaactgggtagattgattcgttccaccttgttctctttcaaaatggttttagctatttttgctcctttacatttccatagaaaacttgggatgacttgtccttacctattaacacatcttgctgggttttttttttaataggaattgcattaaacctgtccatcaatctggaaggacctgtcatctccacgttgttgtatcttccaacccacgaacgcggccgtgtctctaggtgtgtgctgacgtctttcagcagcattgctgagttttcagcatgtaagttctgtgcatgttttgtcaggtttatacctaagtatttcgctttttggagtggttttaagtggttctgcgtatttaatttaggtgtctgtgtgttcattgctagcgtacaggaatactattgaatcatttaggttgatcttgtgtcttctgactttgctgaactcacttattaattttctttctttttttttttttttttttttgagatggagtttcactctgtcgcccaggctggagtgcagtgacgcaatctcagctcactgtaacctctgcctccccggtacaagcaattctcctacctcagcctcctgagtagctgggattacaggcatgcgtcaccacacctggctaatttgaatttttttttagtagagacagggtttctctatgttaggctggtcttgaactcccgacctcaggtgactggcctgccttggcctcccacagtgctgggattgcaggtgtgagccgctgcgcccggcctcgcttcataattctaggagtgtttttggtggataccttgggatttcctacaaagacaacggcgtcatctgtaaacaggcagtttcgtttcttcctttgtgatcgacacgccttttctttccttgtcctgcgtactgcagtgcccagcgcttccagcaccatgccggatccgatggttagagcagacgtcctttcttgttccggatctgaatggtgaagggtgattccttgccctcgaggagaatgctggctgcagggcttgtacagatgctctttatccagcggaggaagttcctctccttctctgtttttccaagtttaaatcatgaatagatgttaaacttgtcacgggccttcccaacactgacagatgtgatcgtgtgagttatcttcggtagctggtaacgtgtggatctcatcgactgattctcaaatacggaaccaaccttcatccctggaataatccctacttggtcatggcatagaattctttgttatatattggcaaattctatttagtaattttttttttttttttgaggcagagtctcactctgttgccgaggctggagtgcagtggcaccatctctgcttactgcaacctccacctgccgagtagttgggattataggcagccaccaccatgcccagctaatttttgtatttttagcaaagatggggtttcaccatgttggccaggctggtcttgaactcctgacctcaggtgatctgctcgcctcggcctcccaaagtgttgggattacaagtgtgagccattgtgcccagtctatttagtaatattttgttaaaaaattttgtgtctatatcactgagggatattggcttgtaatattattttcttgtattatctttgtgtggttttggtatcagagaaccactagcttcataaaataaattgaggctgggtacagtggctcatgcttgtaatcccagcactttgggaggctgaggtgggaggactgcctgagcccaggagtttgggaccagccagggcaccatggcaagatcctgtctctacaaaaactaaaaaaattagtgaggcgtggtggtgtgggcctgtggtcccagctacctgggaggctgaggcgggaggataatttgagctgaggaggtcgaggctacagtgagccatgtttgtgccattgcactccagcctgggtgacagagagtgagaacctgtctcaaaaaataaataaataaataaataaaacgtaaattgatgcttttccttctcttctattttctgggaaattaatcttagaattctccagtgaaaccatctgagcctggatatttctttttggagtttaaaatgacaaattcaatttctagttatagggctatttaaattattatttcataccaggtgagttgtggtagtttgtgttttttgaggaattggtctatttcatccaagttataaaatttatgtatgtagatgtttgtcgtagtcgcttattatccttttcagattgcagggtctgtagtgatatctctttttcgtttcgagacagaatcttgtggtgtcgcccaggctggagtgcagtgctgcagtctcggctcgagcaattctcgtgtttcagcctcccaagtagctgggactacaggcacctgccaccacgcccagccaagtttttgtatttttagtagagaccgggtttcaccatgttggccatgctggtcttgaattcctgagttcaggtgatccacccgccttggcctcccaaagtgcggtgatttcaggcatgagccaccacacccaacctcttttttcatctttgatattggcaatcgtatcttctccttttgttattcttactagagggttgctgattttattggtcttttaaaagaaccatctctttgtttcaataagtttctctattgtttgttttcagtttcattttctgctttttactattttcttactgctccttgctttaaattttttcctagttattcatgtgatcttgagctagattattattattttttaagcgatggggtcttcctgtgctgcctgatgccaagaggctggcgttaacgtcctgggttcacacagtcctcccacctcagcctcctgagtagctgggactacaggtgcttccacggcatccagctgatgtcagattattgatttgagatccttcctctttctaaaatctcaggtctcttttctaatgtatgcatttggtgctttctctctcatcactagtttaactacatcccagaaaatgtgacatgtcattcagtgcaatgggtggcatattctataaacatcattaggccctgcctgtcgatgatggtgctcctttatgttcttgctgaatttccatctagttattctacctattgttgaaagaagggtgttgaaacatccagccgtaattgttgatttgtcgagctctcctttcagttctttttcttcacatgttttgcagatctgtgcttagtgcacacacttaggattgctacatctgtttggcaggttgattcttttctcattgtccgtctttgtctccaataatttttgcactgaggtctactttgaggttaatacaatgaatcctttattttcattaatagtcacatatttttttctatccttttactttcaacctgcctatacagagggtccctaacttatgagagttccactgacagtttttcagctttacaatggtgcgagggatacgcactcggtaggaaccgcactgtgagtgcccagacaactatcctgttttcacttccatacagtattcagtaaatgacatattcaacactgtattacaaaacaggcctgtgctaggtgattttgcccagtgtagtctaatgtaagtgttctgagcacgtttaaggtagtaggctaggctgagctacgacggatgtttggtaggtgtattaaactcatttttgacttacattttcaacttatgctgcatttatcagggcataagctcattatgcatatatttaagttactatcttttttttttttttttgagatagggtcttgtgtcgcacaggctggagtgcagtggcatgtcttgggtcactgtagcctcagcttcccgagtagctgggattacaggcatgcaccaccatgcctggctaattgttgtatttttagtaaagagggttttgccatgatggccaggctgattttgaactcctgacttcaagtgatacacctgcctcagctcccaaagtgctgacattacaggagtgagccactgcacctggccaatctttatctcttaattggcttatttagaccatttacattgaatatacagtcggtcattttacttcttcccatctgttctgtttctgatttctttgtttttcccaacctgctttcctatgggttatgtaagtgttttagaattccattttgatttgtcaatagtgtgttccaatgtatctcttagtataggttgttttttactggctgttcttggcacgtaacttacagtctactgatgtcattttaccacttcaagttaagcatagaaacctcacctctatgtccatttgccctcatccatttatagttatcttaactacttcctctacataaactttgaactacttcagacagttttatagcctttgcttaaccatccaacatgattggaactcaagagaaggaacgtctattgtatttacccatgtcttttcttttttcttttgagattgagtctcgctctgttgcccaggctggagggcaacggtgtgatctcggctcactgcaacctctgcctcccaggttcaagcaattctcctgctcagcttcctgagtagctgggattacaggcgtgtggcaccatactcgctcattttttatttttgtagagacgagacttcaccatgttggccaggctggcaatgttttattatctctggtttttagaaatttgactttgatgtgtttaggtttgaatttctttgggtttttcctatttagggtttgctcagtttattgactcggtaggtttgtccgttttgccaaatttgggaagttttcagttcttatttctccaagtacattttcagccctaaagctcactctgtcttcctcctaggactctgatgacatgaattctggatcttctgttacagtctcagtcccacagatccctggggctcttgctgtttttccccgtctatgtcctctcacttgttcccactgggtactttctatgtttaagtttattgattctttcctctgtcctcaccattcagatgtcgagtgttttgtgtcagttatatttttcacttctaaacttttcatttggttctttaaaaaaccgatttctttgctgaggctgtattttttatcagttgtgttcataattactgcatgcgttttcgacggctgcattcacatctctgtgaagtcactctaatacctccctcatcttggtgctatcatctgtcgactgtcctttttcaccaatgtcttcctgtttcctgctgtgacaagtaatttttccactgaaaactgaacattttgtgtattaggagattttggatcttatttaaaccttctgctttagatgacttcttctgacctcatgctggtagagacaggggtattaccttgctcctgccaggttggggtagaactccagtggacgcattgggagtattccttgttgtttctgggtagggtgggagtcgtggctctgcactaggcctccatgacactatggcgggggtggcctagtcattgctggctgggtggtggtgaaggtcctgactttctggtagctattacgtaataccactctggaggggaggagcccttcagtactgccaggggttgggggagtccaggctcctcgtgtggtctccactgataccacagaagcgggggatccttcctgcccacttggatgaaaatctcagcttcctatttggcctcctctggtagcatcccagtgagccgtttggaggagagtccaggctccctactccataccttgctggtgtgggtggggccatggttttttctgtggtgttgcctggagtggtgattattttatgtaaatttcctgtcttgctaggctgctcttttctggccctttagtcagagagagcagatttttgttgaggtgtttcttgtctgcatctgctggcattactgggtttccagtttcctcacccccaagtctagaaaatgaggccgaaagcaagcctaggcgatcaccaccattttggggctgtggctccgtcccgagggccctgctggtggctctcttctctcaccttcggtcttcctgttttatgtataacgtccagggatcttggttgcacttagtgggaggaacaggggtaagtgtctgttccatcttccagttttaaagtcgatgatgaactcaatgcaggcccacggttagccacagcctgtcatggtaccacctgctccagctgccaaacatgtgtatcatggagacgggagagatgtgccgtgtggcagtgttcaataatgttttccctaaatgttaactcattactggttcacataaaatagttactgcttttcacacttggttttcacagtatccatcctttcaggtagactttgggactcatggatggacctgaagctgctctgacatgattactttttccagcacctcctggctgagaaacagatgatccgactgtgtgcttggccagaagaggcttccgtcacgacctgacgatggcaaaccttcctctgggccagctccagggtccccaggcaccgaggaggctgcgatctggggtgggggctggggggctctgaaggctgctgagacggggcagtaacagagaagacccgtattgagcctcgaaggacgagctctggggcctggtccccagtgagccaggggaacggccgcctgtccgggctccaaggtctcaggctcccagggctgctggtggccacgtggcaggcaagtcacctggagcttgatgccaattcacaggaaggtggccctgagggcgccagctaggagggcggccaccccaccgggggctctgggatggagcctcccctggactgcctgaggccgggcccatgaggagggaccccatagcccctctgccccagctccctgtgatacccgtgctggggaagcagccctggaagcatcgcttggccgggagcacctgcctgggctgccagactcgggcccagctgctccactgcctctgtggacctcggcgcccctcccatccccgccctccggctccttggctggggtctccaggcagctgtgagcaactccagagggtgcagctgtcccagctcccgagtgttcttggagggaaaatccagagctgtgttttccgtcagaatcggcggctgatggcgcaggggaggggtgggcagtccagactctgctctgttcctgctacctccagggggctgctcaatcccaaccatgtggggcaggggatacaaacgcttgtcagagtggccgccccaggtctggtcacgtggacgtctccaatcctccatgctctgccccaccctgggccccaccccacactgtcctcagatcccctcccgtaccccagcggggccccatccctgcctcctgctcctcttctgaaggccccagctctccccaaaaccttgtcctctggtcacaatgctcagggtccttagtgtctccctgtgcaccccagctcccctgcgtggagtctggaaagtcatccctggtatggagaggagggtgacttcccccatggctaccacctctggctcctgagaatctgaccctgcggggctccctccttggaatgtcaccacgtcactggccggagtgggcgaggctgcagggcccacagggctctcactgcagtcccctgcccagttcaccatggacccctggggctcctggagtgagggccctgcctgtccttcttgcctctccaggccaggagcagaggtggcacctagaggacacctcaacaaagctgtgagccggggtcaccctgcccagagcagctgtcctgggctcctctcaccacggctggtttggtttgaggtgggctatgaggcaggggtgggaccagccttgatgccaaggctgatgtggggcggggggggggggccctttttgctcccagcaggccccacctcctgcctctgcgggagggaaggggcgcttcccgtgagcaggtgggggtgcaggtacaggtggtgggatcccagcagacacctggatttgggggagacccctgagcagcggcagggagggcatcctacctgggcgggggcctgcccgcgaaggggttgtgtgccagcagggacaaggcctcggcgtcgctggccaggagcttgccagccaggtggatgatccagtcgttgtgctcgtaggtctgggaggagaggtcgggctggagacggctgtgccactcgctgtccaggcacagcccctccggacgctcggctgtgccctccactccctcctgaggctttcctggaggtgggttccctgggcagccgcactccagctctttggctggggtccccttaaggggctgcctgcttcgtgtagccctgaccactcattcccatgtcggccgctggcttcgctcccctggctgggtgccttggagcctgtccaccccagcaccctctgtctgggccttgcctccctgaggctcagttttctggtggctgagacgggaccgggaggacagaaacagcagctctgtccatgggtgcctctgctacccccagccctggggattccttctttcctgttcgctgagacagggtctggctccgtcccccagactggaaggcaacgctgccatcatttgaggctgcagcggttgggctcaatcgatccttcctcctcctgcgtagctgaaaccacaggcgccaccctcagctgctggctaacttttgtattgttcgtagatacagggtctcgctatggcacccgggctgggattcctggcatgagacactacctggcagacccggggggacggtggggctgggctcccacatgaggcccctcctaaggctgggcctggatgtcgtgtgggctcagttctcagctcaggcaggatcccatctctcccagcctccctccccaccagccccttcagtgggcgttctagaaacctgccatctatgggcagaagagggtggggtacaggcaggtccatgcgcccgccagggaccgtcccccacctggaaggccgcgaaccacatcagccagtccaggcggtagtggtacggggagatgaggcagggccgtctgctggggtcacctggcttgcacttgaactcgtagtcctcccacatggcatcgggggcgctggcgttggagctggctgtgccctgcaggatcacctccgcccgctccttggtgatgctgccgggagaccgaggcaggccaggcccacgtcacacaccggctgggccgagtggggtgcatgggtggggggggttccccgactgtccatcctggcccagggggagggctacagcctccacctgcctcctggtcaggggctactgagaggctgggtggggctgaggagaacttttgggaactgtggccccagggtctcattcgagaacaccttctctgcccgtgaagacccagctgcagccgccatgtgccccatgcccctcggcagctcagggtggacatgagggggacagaggccaaggggctggccccaggacagggagggtgcctgtgttcaggtggcactacctggcattcccacgcagggggttggggcctggtggcctctcccttacgcccccagtaggcattccagggccgcagcccacctgcctggtgacctcgggccctgcccctttgcctcatgggaccaggacgaggaggcctgcgtgtccaggcccggtagtggggacagcacggcctgtgcctgggtcaggctggggtggggcaggggacacttggggtcatgggggcctgcactgtaaccccacctgaatgtggctggtcagggctgagtctccccatatacccagctccgggggacggggaccccaggctcataccttccgaaggccccgtaagtgttgacgatgtgaagagagttgaagtgggtgttcatgacctgcctggagctcagcaagttgaggaccacgggcacgctgagccaggccagcaggacgcccagcgagacgttggctgcacgccgcaccacggagcctggcaggggagtgacatcttccaggtggggctcccagctgccccgtggcctgtccctggggagaccccagctgctgctccctaagggtcagctgtcctgggtcccggggacggagcagcacccgaactcacacaccttgttcctggcacgctacactgcggacggcgctgactctcctcctaccctggcgtccccaacccacacgggcaggctgtggggctggcaccacccgactttctcctgcccttgggcaggggcccccagctgagccacctaccgaatctgggctcgggccgggcccctcggatgtccctctgcatctgcagaactcggtccttcaggctgcctggcccagaggggaacaagaatcccagggtggcgtcatcaaagcaggccaggctgggcaccatagtcagccagttcaggaagctgaggttcccgctgacgatgaggacggcctgtggagacgccgcagctgagtctcgtgcaggggctcgtgtggggcccctgggcagctggcgcctctcttcctggagcagggaggggggagggaacctgcacccagctctgcccttgctgtccctcgggcccagcatcacaactgaaacccagctgtgccttcatggaggggacagcagatgcctcagaggtgccttccggcaggtgcttccagaacattcctcccatgactgcacatttctgtgcaggttctgtcccttgctttagtgatccgcaaggcgggggctggaccagaccaccagaccctgtgccctcctggaactcctcactttcagagggcacctgccggggtcatgcccggggaaggctggtgagtccaaacagaggaggctgtgcttggagagtgggtactggggacgcccctcagccgatgggtgacacagacaacaggggccgtgggggggccaccagtaacgcccccactccaaaatacgaaatgcaaggaagtgagacacaggcacaggaccctgtgccacagagatgaacagcaggagaggggaggggctgcatgcagggctggctgagcagcacggctgggagagctccaaggaaagactcagcagcagcagtgagtaaacctgcggcaggagggactcagagggacccgcttctggacatccccgcaggccagcgatcgttaggtgacgaaactggagatggagccgctgtccctgcagctccgtcgggtgatatcacaggtgtgctgccagacctcacccctgccgttgccgtggaggcatcagggagacaggggcagcttgcgtggccggtcgccctgcatgggtgatggtctgcagctgagccggtggaccctgggccggcaggacctgggtgtggcttcctcagacagctccgtcagccagatttgatgcatcaaagcccagcctttatccccgtaactcaggaggaaggttgagggcagggacatcgacgtctaatgaagggactcgtgagggcagccacatcagtgttatgggcgatgatggtgttttatgaactgtgcactcatggctctccctgggtgaattgggaaaaatagcttttctggttctgagccccaaaacagttatttcttattctccactgtctacaaggttactaaacccctgtgccaaaaacagccccgcctcgccctggctggggttagccacctctgccaccagctcccctccgctggtccagacccccatgccctccgtcctgagtgtgaccagggctggtctggggtggggtggctgggagcccctgagctcccgtgacagggagggtgcagggctaggcactgaggtctgacctttgggcccactcttggggatgctctggaggagatgccacaggtgacactggaatgtcctggtgggaaaagctcgggtctttctggcccttcgctgtggtcagcctgactggcagatgggaccaaagcgacctggggcacagcctgagccagtgcccgttcggatgctcggccatgccagaaccatcaggagctttgaggaacacccagccctgagcacctgcctgcctgggtcagggtgggccctgcctgagtgtatttccaaagcccccttgggtcatcctgctgtgggctcagtggggaactctagcctcagggaactagggctccagagagcacagatctgggcatcagatcctgtttctaagaaagcttcggggctcggggccctgctccatgcagaggcatccccagctgcgccccgttcagctgctctggtgcatctctcgccctccatctggtcggctgttttgttatgaaaacgcagttccgcgtagagtgcacggcctgagcgctcctgggggacctcgccttccttgtttttcttctagcatcactgagccatctcctcagagggaaatcagtcttctcactgcccatctgtgctcgcccccgccggcggagtcctcacaaggctgtgcggcccacagatgacccggccggtggctgggagcggaggcgaggcccgagggggtccccaaggccggcacaggaagaggagcttgaggtgatggaatcctgggcccaagagacggagcagcaggtgttccgaggccaacggcgcatggccccaagaaggaagagtggcatctttggatgcagcctcctgcctgtcagctgccacggagaacaggtggcttgtggggaccctctgccgaggacacgcccgcgctcacagggaccctccgccgaggacatgcctgttcgcggggaccctccgccgaggacacccctgcgctcgcggggaccctctgctgaggaaatgcattgtgttccaggtgggcactctggtgggcgtgaacccaggtctctcttcagtgtcacagagaggagatgagggcagaagaacatggtgggaggtagagaatctgctgaggtctaacaccagtccatcagcatccacgacagcagtgacccagagccctatgcctgacccacggaaacgcatgcagccttgcaaaggaatcggagttcagcacgtgccccgaaagggacagacccagggtcatggtgctcagggagggaggctggacggaggccgcacattgtaggatgccagttgcatggaacgtccgagtcgggaatccagagatgaagctcccagtggctggtggaggcccggcggcgggtgtgagggtctcctttgccgggtgtggggggggtatgggaagttctggaaccaggcggaggcggcggttgcatcacgctgtgaacgtgctggaggcccccgagttcacttcaaaagcatgaacttactttgcgttatctgtgttgtttcatcacaaccgaaacacagctaagggccggtgagcccagctctgggacagagcctcaggacagccggcctgtgtgtgcggggctggcagggcctccgggcctctgtcttgagcgggcgtggggtgcagccaccacagggcaaggagccctttgggcagggcggggtggggtggggccggacagcccgctgtgggcaggcgcctcagaggttccagacctgagctcaccccctgcccctcccgccctggcagtccggggctgcgtctccctgtcaccagtgccctagtggaggctgatggctcccgtggggtgctggctgggcggccgggctctgcggtcactgctcttgtgcacctctccaggcaggcagcggccccagggccccgcggaaccctccggaacagctgtgtaaactgcgtgggaggagggaggctgctcatgccgcaactccccaacggaaggatcacgggaaccaggacaggctccgggggacggtgctcagatgggaacacacggaaccaggacgggatccggggaggcggcgctcagatgggaacacacggaaccaggacaggctccaggcaggcggcgctcagaagtctcagggcactcggctgtcacagcgcggcacaggggagtacgcagccccagccaggacactacaatgttagagggcgcgggtcactctcagccccacaccatatcatcccccagacaccctctgccctgtacgcctgtgggggcaaaagccctagttcaagaccccacactgcctgtgagggggcaggatacatcgcagccgggactgccggccgaccatcttgtcttccaaggggggacgccaggccacgccgcagagcacagccacgaccctggtgcttccacctcgtcctggacacagtgtggggctggagaggatgacgcagcctgacctccgaggcctggaagggaggcgctgcctgtgccgggtctttgagggtggtgctcacagtcccaggtgcagtgaggcccagctctgtcccctcccctttcagcatccccactgtccaccgccactcaccccaccaggcagcggactccaaaacggggccagcaccggcactaagggaacccgcagcctggccgtcatgcttgggagggtccctgtctgcctgcaccagggcccgttggtccaattctcatctaaccccctggccaggttcctgcgttctgaataaacaaggacgtttttgaggcctctggttcaagggtcacctccccattccatgtcacggtagctcagccctcaagtgactcccactttctccatttacttaagtaactcagcaccttgcttttcatgagagcttctcccaggcagcatcagcttatcgggagaggggcagtggtggaactggccagcacagcctgagggagggacgctacagggtacacgggccatggaagcgggaggtgggatcctgagcactccccactgccaggcagccacggagccaagcagaccaacacccctgcctgggctgtgtgtccaggggtgcccttggaccggcctcggaaccagacccgagcctggcgtgggcatctctgtgttctccaccggcaggggcaggcgggaccctggggcagcacagcccacgcaggaggtgtgtggggtcggggtgactcccgggagtctccagcccggccctcctccagcagctgggaccccaggaccgcatggctgaagacggctcaggagtcacccgtgtgtgtggccccacccaggtcaggaatcctggaacacacccctccattcaggctggacacccctccctgggtggcagtgggacccggggctggcacagccggccctggccccacgcctgtgctcagcacaaccctccttgtgcgccctgtgggaagcacatgtgcccggggctccgtctgttgcccttcagaggctgagtggagaaacaaaccggggcacgtgcggaccacgggcgtctcggaaccgaagagaaacaagcagtggagcctgcaggaggtgcaggagcccacgcgcggccgcggagggcaggaagccagtccgcaaaggctgcacaatgcttcccactctaggatgtccggaagaggcagtaccgtggagacggagggtcggcggggcacagagaacttccagggccacaagcgactctgcatgaagctgtgatggggacacgtgtcgtcgtccgtttgtcggagctcacagaatgagcaacactgcgaatggctctcctgtcagccgggactttagttggcaacagtttatcagtcctgcctatcaactatacaaggtcctggccgatgcaagacgctgagcgcagggaaactgggagggggggataagggaacctttgtagtctctgcacagtttttccgaaaatctaaaagtgttctaaaataagtcaattaataaaacgaaacagagctgaaacactggagcaaaggacgcaagtggcttggggcggacagaggcaggctgggtgggctgaggaccttggacagaggcgggctgggcgggctgaggacctcggggggtcatggtggcaaagatgctgcccaaactgagaccttcagtaagttaacatggctgattgattgataaccactgaggaaacagaggatcttccttatccattagaggagggaaaataacagaaaaaaacgagagagaaagatacaaagaacaaagagaaaaacacaaagatgtggaaatacgtccaaatatgtcagttgagatatacgggcctgttacttaaaagagaaagacggccacgctgaccctaagcatgaccttgctccccgctgtctcaggagatgcgtgtcggtgaggacacaggccttgaggccgggcgcacacctgcagtcacggcactttaggaggtcaggcaggaggagtgctcgagccctggagttcaaaaccagactgggcaacatagcgagacccccagctctacaaaaaatgaaaaatagctcggcgtggtggcacctgtagtcccggctacttgagaggctataaaactaagataatactatgactttttttgccaaaagatttgaaaacagatgaacaaattcccagggaaatgttcaccacaaaaactgcctcaagtcaagaaggaatggaaactctgcgtgtcctacggcccgcaagggtgatcagtcacagagaccctggcggcgcaggtggcctcatgcaggagcactgccaggtgtgagggacggtcacctctgctttccagactcccgcagaggaagaggctcagatgttctgggaatgtgaacttgcttcagcatccacagcattaatgtaactcgccacgttacagacgaaacaacaagtcatctcgtgactgatggagaaacgccacaactcaacatccattcatggctaaaaacccacaaaggagaagtgaataaaagcagccacgaaaacaacccacagccggcatcgtgagaggcagtgcgcggggtggcgggccctccctgctgtgggaccccagacccaggacagcactcgagcccgcccagcaggggagaaagggatggacgtagaaccggcagaatccctagatcacccacaggacgcgtctctgagggacccgcagacagacggggaagtaccagtgcagaggttgtctgagaaaggtcaaggtcaccagagtcccacacttagccaccaagaggaggaagtgtgacttaaaagggcaccatttacaacatcaacaaaaagaagtcacctcagagctgcagcctacaaacgcgcgtggggtctggctacacagaatccactgaagctattccaggagcccccaaacacacatggggtctggctacacggaaccgactgaagctattccaggagcccccagacgcgcgtggggtccagccacatggaatccactgaagctattccaggagcccccaaacacgcgtggggtccggctacatggaaccgactgaagctattccaggagccctgagcagctgcagagagaaacgtgcggtcctggctgggggacgatctgtgagcaagtccgttcttcccacttagattcacggcgacatcgatgcccacagggaaatcacctgatgggcaccggtgccagcctccaagcagctaacgcggaaaagcccgagggagtcaggagctgctcagggccccggcggccagagtgagggtccttgctggggggaggggtcaagaacagcacagccaccctggacacgtgcagcttccagtaaggtgaatcacaggcctgctcacgatacagtagcgcccttgaaaatacatccacaggatgacgagattgcacctctgcacggcaggctgtggtgaaaaccagaaactaccacacgtgcacagacgggacgggtgaaccgaccgcaggcacgcaccgtgaaacaggacccggccaacaaccatgggcgcccccacgtgcaccaacgtggcgtggcacccgtgcctgctgacggagctttgcccctctaggcggcggtgctctggcaggggtgggcagggcaggggaagggcgggggcaggggcgggcagggcaggggaaggggcgtgggacacccaggtacatctgttttccagagcacgtggaacgccacctggacctgtgcattttcctggctgtatgttacacctccattgaaacaatcgagagagagaaccacctttaaaatccccaccacattttccttgggaattgacagtcggaatgtagcgtttacagggaaaagcaaaggctcgggactggcccagcccccctggaggcagcgtgggggtgctctgtccttcgaggcgccctcaatgcagggggcttgtggggcagggatggcggtgactgtgggcaggacggggcgttagggggtacccggggttccgggggctgggggaggcagcccctcacccacatggaggcaaatgaccctggcctctctcagaccctggttccccgtggactgacatgaacacttgaaaggaaacctctagaatggaagaatcttaggagtggatcccaggaatgtgggggtgtccacacagggccttggcgtgctgaccccgtcccactgccgagcccaggacatggccgggcctctcgcagctgcaggaaacgctcttgggaggagccagtccttggaggaagcctgggaaggagaccctcagcctgcagcccgggacagggctgcagtggggcccgtgacacaaacgaaggctggggaggacaggctgtccccaagaaagggggcctgtaatgccccagggtcctcccagagagcggggcagccagaaatagggcgacgggccagcgtctctgtggacacggggcagggcgggcggcgcgggctcacctggaacaggatctgcagcaccccgtggatgatgcacgcccgccggccgaggaagaggaagaagggcaccaggagctcgatgaagtggttgctgagcgtctcgaagcgatggaaccaccagggtgagtggtgcaggtagtacgccacaggattgggcatcggctgggtctgcagggacaggaggggccgtgaggtgcctggccgatctcggggggcggggctagggagaggcttgtgggtccctggccccctgaccccggctcctactgcacacaggatccccccggcccgcctggccctgcacacgtggagcccacctgccacgctaagaggggccaagagacattcagggagcttttgaagcaaaagcaaagtgttcatttttgtcttaaaatctttaccatctaaaagcaaagaatacacaccccagctgaaggagagacgacacctgtaaaccccgtgcccaacttgagaacacaggcagtcggagaacaggcagtcggagaacgcgccgcctgctgcccacaggcggccaagctgcaacccccaagagccggggtccacaggcggcccctcaggctcaggatgccctttccctggggatggacacgtgggtggggacgtgccggttggggaccagcaggaatggggcccgggtcccgagcccagctcaaggctctaagcgcaagacctggctgtggggacctggaagcctcccaggccaaggcacagagaagtccccacacctagggtcccactcagcagcccagccaggaggaagggtgggaacttgccctgcaccataattcaaaactatcaaggccaggcacggtggctcatgcctgtgatcccagcactttgggaggccaaggcaggcagatcacttgagcccaggagtttgaagccagcctggacaacttatcaagaccccatttctataaaaataaaaaattagctgggcatggtggtgcgtgcctgtagccccagctacccaggaggctgagtcaggaggatcgcctgaacccaggaggtagaggctgcagtgagccacgactgtgccacggcactcagcctaggcaacagaacaagaccttgtatcagacagtcgatccatcaatcaagtcagagtggttgtgcagacttgtctggagtgagaacaccccactggcaaatggggcccaggcccccacacgctgttttctggaagcccccaacaacgggatccagagtggcactgccagggctgtgtgagtcggtgagcccagggtggtggtgggaagagtgccctagatggacgatgctgcacgctctgcttgcctttgtggaggggcctgcccgcatgctgctcagggctgaaggccttgctagcacagcccgcgggagccattgggcctggcacagccgcagaaaccccactagggacaacaatgaacacgccctgcagggagggaggcggcccccagacgcttcagaatccgcacccaggtcctgggactcccagggtccagagaggctacgtggaagtcggggcccccaggtggcagaaagcgcacataggggctgtgctgggcagcgcttgctccggggtgggggtgtgggaagcgcaggagaggcggccatgtgcacacccgagggggtgaccgggcacagggccccagtgcaccccaagagccgtgggctggggagggtcctgaggcctctgctcatttgcttagagggcaaagagttatttttgtttacactgaggctaggagaaaacatcatgacctgaaacttggctgtgagccgtgaggtgggtgtggcagtgtcgcatgctgcaggcaaggccaggagttcccgtgcagctgggacactcagcccgcggccaggggaatggtgggtcagggcatggcggtgctgctggcccagacctcaggaaacagcctgcaaacttctcctaaaaagacaattttaaataagaaaaacatgaggaaagagtgaaggggatgacacctgtttagggacttagaaggcagcagatcttgggggagaatgagtgtcgtctgttagggcttgagtgccccatgtgggacccaccccctagtgcccacagggaaaagccagagaagaaccggaatgcctggtctgccacttcccttttaggctgcttgttgtgtgtttggggttgcggcgagacccatgcaggaggcagcaggcttggccaggtgttgggaacaagcatctccagggctaggcccacacccgaagtcccagctcttggtctggcttttggggtgggggactttaacctctccttccctcttgcatgctggggctgctgacgtgtgtcggctgagctctgacggggaggggagcgggggctgcttatgcttatcaggtgagggtcttgggatgaagaaggaggtcccatgtgttccaggaacaagccaatcacaagcgtccccgtgggaagcggcccttggatgtttgtgtcccgaagtggtaattgccacgggctctcagaacctcacctgggaaagggccacagcagggacacagtgcgatgcctttgtggacgtggaacccccacttcccaccaaggcaactgcagatggagaaaaatgacactgagtgataaagacggtgacaaatgtaacagacatggggctgacatgacccaatgctgtgttaaaaagagaagagcatcaggctcagctgtagtggccactgcccctcctgagcatggctcgcctcccctggaatcccagccgaccttgggactcagctttggccaagagaatgcagcgtgagtgatgttctgaactttcaagctcagtccttgaagaggcagctccaaccccattaaaggtccctctactctgaggccaccaagctgtgaggaagccaatggtggccatgtggcaaggccaccgggagatgcactaggttccagtacaagtgaagccttcctggacctcccggcctagctatcagctcgtgaatgaccccacctgacaccacgtgcagcagaagagccacccaggggagcccataacaggaccaggagaaagttgctactgctcaggagaagagctgcccagcagaggccatcacaggaccaggagaaagagaagccagcaagcagggcccatcgcaggaccaggagaaagaggagccggcagcagagcccatcgcaggaccaggagaaagaggagctgcccagcggggcccatcgcaggaccaggagaaggaggagccggcggcagagcctatcacaggaccaggagaaagagaagccgcccagcggagcccatcgcaggaccaggagaaagaggagccacccagcggagcccatcgcaggaccaggagaaagaggagctgctcagcagagcccatcacaggaccaggagaaagaggagctgctcagcagaagagctgcccggcagagcctatcacaggaccaggagaaagagaagccacccagcggagcccatcgcaggaccaggagaaagaggagccacccagcggagcccattgcaggaccaggagaaagaggagccacccagcggagcccattgcaggaccaggagaaagaggagctgctcagcagagcccatcacaggaccaggagaaagaggagctgctcagcagagcccatcacaggaccaggagaaagaggagctgctcagcagagcctatcacaggaccaggagaaataggagctgctcagcagaagagctgcccggcagagcctatcacaggaccaggagaaagagaagccgcccagcgaagcccatcacaggaccaggagaaagaggagctgcccagcagaacctgtcacaggaccaggagaaagatgctgctgctctaagccactgaggcttggggtgtgttgggcaatagcagatctctgaaacagcctgaatccagaagccaaacagtgttgaactctgatgttactgggaaaaccccattttagagaaaccaaagtaaaagtctttctgagtctttgggtaacagatacttagtactgactcacacaccctccaccccagacagggctcagcactcgtacccgtgtaagcctcctcacatcctggagaggtacagaaacaatatttgaagaaatattggccaaatattttccgaatgtaatgacaatgataaacctatagattcaagcaactcagcgaactccaagcacaaaaaatatgaggaaaacaacaccagataaccaaatggtcacattttactgcatgacaatatgacactattgatcactttgattgtagtttgattgacaaataatcaaattgtcacaaactgcctataaatgttaattagatcatgttggttagtagtgtttttcagctcttttacatccttccttattttctatctacctgctttatctattattgaaatctccaactttatggatttgtctatgtctgcttacagttctatccatttttgcttcatgtcttttgaagctctattatcaggcgcatacgtgtttgagagtcttctgacctcctgataaacactgtgaaatggcctctttactcctgatcatattctttgctctgaattctgctttgtctggtgtgaaggtggccagtccagccttcttgtcactcattcacgtttttggtatgtttttccatcctttacctttcagcctgtgtgtctttgtatttgaagcggatctcttagaatagtactacaaactacacatcataatcgaatattgcttaaaactcgtgataaaaatcttacatgcaaataaagatgttacagagtatgtacataaggagttgtcacaggaaataatgcaaatgagacgagagtagagtacaatctttaaagtactaaacctgtcaacctagaattctatacccaacaacaatctctttcaaaaatgaaggtgaaataaagactttgtcagacattgacaagctgaaagaacttgtcaccagcaaacctatgctagaagaaatgtcaagtctgttaggtggagggagaatgatcacagatggaaacctggatctccacgcaggagtgaagagctctggaagtggtgatgttaggtggagggagaatgatcacggatggaagcctagatctccacgcaggagtgaagagctctggaaatggtgatgttaggtggagggagaatgatcacggatggaaacctcggtctccacgcaggagtgaagagctctggaaatggtgatgttaggtggagggagaatgatcacggatggaagcctggatctccacgtaggagtgaagagctctggaaatggtgatattaggtagagggagaatgatcacggatggaagcctggatctccacgcaggagtgaagagctctggaaatggtgatgttaggtggagggagaatgatcacagatggaaaaaagagctccggaaatggtaagtatatggatacacaatgaggctgttcttccaattgaatgaaatgtctctgaaagataactggactgtttaatcaaactgtttggcaataatagcaaaaggccaggagaggaaaatactgttgggagaatattgttgtaaaattctttcagcatttatgagataggcatagtataccttgaaggtgagctgtgatggattaaaggcatatactataaaccctaaaaccaccacacaaataagacaaaaaagttacagccaagaaagaaaataaaaaggagtcacaaaaatattcaattaatccagaggaaggtgtaaaataacagcaacaaaaaggaacagagaacacatgggaggatcagaaaacaaatcgcaagacaacaggctgaaaccttccccaggaaagactgcattggatgcaaacggcccagacacccagataaagggcaggacttgtcagactggatttaaacataagacccaagcatacgccagctctaagagatccgcttcaaacacaaagacacacacaggcggaaaggtaaaggacggaaaaacataccatacaaacacgagcgacgagaaggctggactggccaccgtcacaccagacaaagcacaattcagagcagagaatatgatcagcagtcaggaggccatttcacaatgttcatcaggaggtcagaagactctcaaacacgtatgtgcctgataatagagcttcaaaagacatgaagcaaaaacggatagaaatgtaagcagacatagagaaatccataattatagttggagatctcaatctcccttatctcaataattgataaaacaggcagaaaatgaggacgtacagaagagttgaaaaacactattggccaatttgatctaatgaatcctgacagaacactgtctgttcatttttggctcaaacggaactttcactaagacaaaccatattctgggctacagaacaaatctgactaaattttaaaagactcaaggcatatcaagtatattctgacaataaaggaattaaattagaaaccagtaacagaaagatatctggaaaatccccgtctctttggagcctttaaggaactttcattccagtgcatgttacgacatttgattctcacaaccgccgtagggtagtgggtgatcagtttaaagctggaaagacagaacttgctcaggatcacacaagccagtaaggggcgcatggaggatgggcagcacagggctgcataacaacagggctcagatgcaggcgctgctgtccttggctgcgtgggtagaacagccgtgagcactgctgaccttgaggcgccacccctgtctcccccagccacggcttgtccctggcaagaggaccccaggacaagcgggaaatccaggcccacggaaggtcggtgtctcctcaggcctgcactcgcccagtgggctgctctgctgagtgatgccagggcacgggcctggggctttgaaccgcgcccggccaaaaccaccctgcagcgggccacctgccaggccaagcccctcccacccgagacccccgacattccccaggcccctcccaccctaggcccccggcgttccccaggcccctcccaccctaggcccccggcgttccccaggcccctcccaccctaggcccccggcgttccccaggcccctcccaccctaggcccccggcgttccccaggcccctcccaccctaggcccccggcgttccccaggcccctcccaccctaggcccccggcgttccccaggcccctcccaccctaggcccccggcgttccccaggcccctcccaccctaggcccccggcgttccccaggcccctcccaccctaggcccccggcgttccccaggcccctcccaccctaggcccccggcattccccaggcccggcactgcccttccttcccagcccccagcacacagagaaaacattctcttcttacaaaaaccaataaaacagccaggagacaaggcgagaagcctcggctcccagccgccggatgggattcaggcgtggttcccctaatggtgacatttacagtcttcacgggcgacgccaacctggatatatattatttccacattagcgggcccccatatctgagggcgcttggtgacccacagtctgagcgggctggcagcccacggctcctggtcgcagttaaaggcattacaggatctcctggcccaaatccttgctgggtgggtcctgggacaccaggaggatagaaggttgtgttgagcttccctgttgggagtcagccaggagcagccccagccgctgtgctctgtgtgagccttgcgggggcaggctggaaaggggcgcctgcctgacacggggatgcaccagccacaagatacactgcgtggaagctggccgggccaggctgagcacttcaacacggattcctgcagctcctgctgggagtgttggggcacacgcggtctcggtacccgtgggggagctcggcgggcacgggggcgtgagccgaggcttctgtcagcaaggctgctctaggcagcagggccatgtccctggggggcgtccacagcagctctgcaccccctcagccactcccacccacgcctggaggccccgcagaactctgggagcccagcccagagagggctgctctgtgtggtccgccccacgcagagtgcgcgctcctagcatgaatggcctctagcctccgagagcacctcagggtgagcagggtggtcgcaggtaccctggaaggcatggccgtggcctgggcccggagtcagggtgcagacagtgacctcaggcaggggcagtgcttccggatcactctacttaagcagtggcctaaaactccccctgcaggtgtgggagcccagagacgcacccccaagttgcaggctgccggccacaggctgggacacccttgctccaggagcgtaggtggccccaggcagatccaggggacccccgccctggtcaggcagctccctgagggtctgtggtgcgtggcctgggccccagcggtgagtcgactctggggggctccgtgcccgtcacggggcctgtctgtagccctgacagcatccttcggcggacggaattgtagttctccacgacgtcggcccaagctcacagacaggcccggcctcggcccaagccttggggtgcagggggtggagctcagtggggtactcctgcaggcagcaagggaagtggccgtgggtccctgcccgcccaggccctggcaggggctgccctgtgccgcgtctgggaagtggctccgaaaggggtgtggaaggagcgccgtgggactgaatcagagtgttggatttcccgcagctttctagcaacagagttatgttcaactcccctaaaaagcaatggagaattgtttgcaacgttcagggtccctgtactccagatccagtgagttttctctgcatcaaaaccatctgtgggagtcctcactccatccttcttgatgacagctgacttcctaaaacccaagtggagagagaggacaggcccggattttccatttcagcagctagtgccatccctgctgctaaaagcagctgcgtgacccccacattcacaacctgctgttgcatccgcgtcgtcaggcaaccgctccgatgtggggaccgcagcaaccctccccacagcctgctgcattctggacggcgcccgtccctggtcgacagacggagcagtggccatgcccagtccaaggccagaagcactggggggggtcctaggtacagggggcagtgtgtggggagagcgaggacaccacatctggggtggggttttagggacagctacatggggaccccgggagagggatgcacaggtgggcagcagggccagccagtgtcaggcagcagccatgaggcagaggcgtcctcagctgggacaggagctgcatcccccctctcctgtgctgcgctggccctgggatcctgggggtcctcacaacggtgctgaggacatggctctggtccctctgccggctgagagcaagcggccgtccatgcatccccggtgtctcatgggagcgggcccttggcctgcggggtctgcactcaccctgggtagaggtcgtcagaactgagttagctgcagggcaccctggtggagtccacagagatctgggaacacgacgtgaggaaagccacaggcttgttgtcaggagtttcaggcagagccacccggtcgcctttcaccctccagggggctggccccttctcttggaacttggggatgccttccctgctgcttctggcttaaccgactgaatttgccggcaactgcctttcgttaccagcagatgaaaaaagcggtgagtgtggggtgtgaggctgcggatggccatgggtgtgaggctgcggatggccgtgggtgtgaggctgtggatggccatggtggagcagttccttctggggagagaagtctgcacactcagagctcccaagcccggagggaggagtcccgagggaggcatccccggggtgcatggctgcctcttgctctgtgctgctgaaacttccggaggttttcaggctcctgaagaggctcagcgtcccctacagcataggggcaactttccaagaaaggggcacccccctctgactccttatctgaccagcaagaatcggaaagacagcaaaagggcctgagatccccgcccacaatgctgtggggcagagggcacggctcgggggttgcaggcaggggcctgccaccttccggaatcaggtcctccttggagagaggattcacgcagggccctgggctcgcagttgacaccctgacttcctgaaaccttcaccagtgcctcgtcatcaagacacacgggagggagcatcctcgtccgagacacaagtctgaggtgagaggggggatgcagctcctgtcccagctgaggacccctctgcctcatggctgctgcctgacactggctggccctgctgcccacctgtgcatccctctcccggggtccccatgtagctgtccctaaaaccccaccccagatgtggtgtcctcgctctccccacacactgccccctgtacctaggaccccccagtgcttctggccttggactgggcatggccactgctccgtctgtcgagtggagtccaggcccctgaggccggtatatgggccattcctgccccaggagacacagtgaaccgcaaagagccgtgtcacggcggtccacctgctgcaggcacggcgccgcactgctctgaacgctcgctactccaggtactcgctcctggagccccaaggggcccccgggaagcaagaaaaggggctcctgggccccgtcccaactcagcggggctccctcatgccttttcaagtcacagtgggttttgaaatgcgattccccaaggacagcctccacagctggaaggagccggcccggccccccgagacagcagctgctgccagagcctcacgctgcctggcttggccctggaccccgtgtgaccatcaggacatcaggctcatggctctctgtgagccaaggctcagcctgtcctgggatgtggatgataagggccctgacctcacacaccctgcactccagcctcagtgtctggagatgggagtggcctcagccacaatccaacctcccaggaggctccaccttccagaagctcagccatgtgggcacaggacccccccatgtgtctgggcctcttttaaggacacagtcgttggatttggggctcagcagtccactctgacttcatcttaactaatcacaaggaggtcccagataaagccacgctccaagctccagggagagtgggtttgggccctgcctgcaggccctgacactgctgcggccaaccctccggtggcagtgacaccgagggtgcctcgagacatccagggccatccctctggcccgggctgcccctgcctgtgtgctccaggccgggcccaccctgtccaccgtctcgggccatgtctgaactggtgttgacggctgacacagagcactcctcacaaacagcacagcagagagctctggtgaggggcagtcctgggcctttaaggcacaggaagaactgggtgctcatgggggcgggagggacccactgcatcccagctggccacgtggacacaggggaaggcagtgctgacaggcagctgtgggcccccccggcccgcctccccaagagttgcaacctgcgtcctcgccggagtgcagctgtggcatgacccgtcccccagaaacaccacaccctggtggtcctggccaggtgagtcctggggatcctgagacactcctgggcccagagcagccacattcactgaagggatgcagcccaggacgcctgatgccggctttgaaatgcagccactccatagagaaggcatcagagtgtttgtttgtggggacatggtgggcgcctcagcatctcttgccaatggaaagctgtgcgggacggtcctcaccagcacgcagccttcgtggacctgagcccactgcaccactgctgtcgccaccggtgctgggccagggggctcagtgagatgcgctatggagcttctggcctggagacaaggggtccacccagctttcctgacctgtcctgagagcatctggagacacgggacccccccaccactttcctgacccgtcctgagggtgatgggggagacacaggcccccctgcccacttttctgacctgtcctgagggcatctggagacactggtcccctcagctttcctgacctgggctgagggcgctggaccttattgagggcagggtggctggcgtgggctgcggtgtgcacagctttgttggcgaaagcctctcacacacgtgtgccctgcggctgctccccgtcacggctgtgttgggaccatccagccaaagagctgagagtgtttactttctggtatttcacagaccgtcagctgaacctgctctcggacaaagagaggagctcacgggtcctcagcaaggcggggcacttgatgggctatggagacatctcaagagcctgaagaataaagtcaggacacagccactaaatgcaggcacaaacgcctgtgccaggccggcacgtggaccaagacccggaatcgcagcagaggcaccgcgtgaggacggtgccagctccacgcttggaggcggtgagtgccagagcaaccctggcagaaaacgcaaaggcagtgagacagccatcactggctgtcggcagcaggcagacgatgatggcttccgcgtgcaggtgcgagtgacgggccaaatgcaggaaggggtgtccaggcctgagatgctctaggtgcaccgtggccatgaccacacgggcccagggtggggatggtgctaccaggaggctcccacatggactgagaacaaatgactatccaagctccaggccccagaccacccccagcccccacgtgaacacgtgagctccaggccccagaccactcccagcccccatgtgaacacgtgagcagttggcaggaactggggcgtctgaagggactcagccttggtctgggggccaagcacagtggaactgtgctgtggttcacacctgccctgtgggacacacctgcccgtgtccaggtaacgatggagccacagttccgtgtggcaggggctgggcacgcagccaggaagcccccaacaggcacctgtcaggggacggtggggagctgtggactccaggaaggaggggccggcccggaggcctgggcaggaccaaggacagcagcggagggtgcccgtgcaggaaccagagcaaaccagctgcactcgagaccatggagggccacagaccccgtccccgcagccccagcaagcccccgtgtgaccacccaccccgtgaagggagggagaggacgtcctgaatcaatgggggtgaccctgtgatgcgacagctcaccagggtgtgcaggactgagccccgccaagagtgggaacggggcggcgtgagaccgggtgccctgccctcacgctgcacggcacgctcacctcatagtggaagtccatgcaggtgaggtctcgccagcaccggtccccccggatcttgatcaggccctgcaaggaagagagcagagggagagtcagtcacaggggctggggatgcggcggccccgacagaaacagcttcccaggaagacgaaccatccacgaaggccgtggatctgggctgcaggcgctgtgagggaggggaccttacgtatgaaacactcaggaaggcagaatttgagaagggcagattcagggctgctttgaggacaggagtttagtgcacaccgcgggcgtgagcaacagtggcttcctttgcgccttccccaacactcattctcagagctccacgcatcatcacgctacagaagttgcgtgtctttaaagaggacaaatgcaccacgccctgcacagaccccacggacagtgtcagagggaagcttctcagtgcctccaggatgagcccaaagtcggagggagcacccagtgcacacgcgtctcagccccgccccctgcggcacaaagggagccgaggcgcaggccccgtgtgtctcccacacactgcagctcgcctgctgtgaggactcctggggcacgggacaggcttccaggggcctgcagagggagccgccagcactggggaaggtgggacttgggcagagaggctgcggggctgggggttggttctgcagtgccagggccacagtgaagcatctggggaagggtcggctcccacacccgtctgctttccctgggtcactcccggcttcagatgattccttcacaagtcagaaacaaactgtcccctcttcccgctaaccctaaaatcaccgctgagacacagattcacatccagcgtctctcacacactggtgcatgggaggtgaaactgcacagatgtggaagtgagtcccgcctcctccatgacaggggtttctgctgcacaaccactcccggccaaatcccctgggctccatccacctgtccaccccactgtccacccacccgtccccctgtccaccgggccgtctgcccactcgtcccctgtccaccagaccatccgcccacccgtccccctgtccaccgggccgtccgcccacccatgcccctgtccaccggaccgtctgcccacccgtcccctgtccaccggaccgtccgcccacccgtccccctgtccactggactgtccgcccacccgtccccctgtccactggactgtccgcccacccgtccccctgtccactggaccgtccgcccacctgtccccctgtccacctggcagtgcgcccacccatcccctgtccaccggatcgtccacccacccgtccccctgtccaccggaccgtccgcccacctgtccccccgtccacctggccatccgcccacctgtcccctgtccactggaccgtccgtcgactcatcccctgtccacctggccgtccgcccacccatccccctgtccacccgacttctacctggcacataagtactgagtgcccttgaggtgccgggccctgctccaccccatagaggccgcatgctgcaggcgcaggtgcgacaaggcgcagagaggaaggacggccaccagtcgtggcagacgcagtggcacataaaggacaggaatccatgctgcaggttcggaggcgatggctgtggtgggtgtagcatggtgggctctggggcagccgcactgggctgcaggtagcgctgtctcactgttgcccacacggtgggaagagggtgagggtctctctggggacactttcgtaatggccgcctcccatcagcgagtgctcccctccgtgggcgtgctggggtgtcgggcctggctcctggtaccatgacactgggctcagggtttccacacgaaatggaattcggggaacacgatctgttcacagcggaggccagcctcggcccggacagagctgacagggctgtcctgggcagggagccccggggcggggtggggatggccacgagggaggaagacagggtgagggcgcccccctcaggcagaagcgtggggtacagcagggctgaggaggccgcggggggaggcccaggagcccctggaacgcagggtcccatctgccacggcgccagtcgcggtcccactgcgggagactggcctccagacggcggggggtgcggcctgaggcctgccggggccatcaggacctccagagcaggggccggagctgctgttgggatggaatttcctcctctccagggagccccagctccagcctcggtctcctgcctggtcgggtcagcctcgggctcccagtagaatcctcctccccaggtcagcccatcacgggctgtagccacgtctgcgaaacattaatacctcccagtagcacggaggccagtgtttggtgatggaccagggaccccaggccagccaggccaacagaaaaccaaccacacacgggagggccttcggggcggccgtgggcccctagccggggccaggcaggacgggagccgccgggttctctggctacatgtgaccgagaaggcagcaggctctgctgctgtctgtgcaggacgacctgggcaggggaggggcgtgtccaattccaacgtgtttggaacatggggctcgcgagactggcgggggagtgggagagccaggagaggctgcaccgcgccctgaaggacggcacgtggctcaagtgaccgatgccgagagggacacgaatgagaaacggcaggggagtgggaccaagagcccagcccggccctacaggaacaccaagcaacaggcaccctgttcctcacgtcacgtgagccagacgggacaccacccacatgcaggctgcacggtccacacacacgcctcggaggggttgtgaggctcagccacccacacgcaggctgcacggtccacagacacgcctcggaggggttgtgaggctcagccacccacacgcaggctgcacggtccacagacacgcctcggaggggttgtgaggctcagccacccacacgcaggctgcacggtccacagacacgcctcggaggggttgtgaggctcagccacccacacgcaggctgcacggtccacacacacgcctcggaggggttgtgaggctcagccacccacacgcaggctgcacggtccacacacacgcctcggaggggttgtgaggctcagccacccacacgcaggctgcacggtccacagacacgccttggaggggttgtgaggctcagccacccacacgcaggctgcacggtccacacacacgcctcggaggggttgtgaggctcagccaccccgcgcactgtgaaggctgcctctggcggggccatgtctgggtccggcatcgccgtctctagggtcttgctgtacgtccctgccctcacatgccctgtgcccccaacgacagggagggcgccgaacacccgggagtgttactgtttaaagacctgaagggtgaactgttttaaaaactgagagtcaggtcttctggaggctgggtttgctcagatcacaaaagcaccggagactgtttcccgcttgggctcctgttctgcaaacaggcatgaaaacagccgagggtgtccagctgaccgggcggagaaggccccactcctcaaggcgctgcccacacccaggggagctgctgcttctgatgaaatgcacggctccaccgggcaggggcacaaccaccgccactgctccccccgcatgagcaccagctctgctccctgcagaatccgagagtggaactctatggagattcaaaccaggaaaagaagaaaaaaacaaaataattaaaatgtcattcaaattctaagctgatatgagacacttaaaaatctgaaaaattctttcaggagtggaggataattatattcctcccatctattgatttctctctacattgcacatgtcagattttccacggatttttttttctcccagagcaagtgtcaaaggaacaaagccttctttgaggcttttcagcccaaaattaattctaaaaaaaaaaatggcacagacaggccaataaacgcaccagacccaaagggagccggggacccacactgcccgtgccaccctcccgctctgctcggaatgccagaactttccaggcccatcgacgatgttcccgccttgcaacgtgtggctgcagcagctcttctcctgatgcctgtgtgtcctgggacacacttccccaaatctgccatctggaaactcgaagtgtcttgacggtcgtatgcggagaaggagacactctgtggagaccccgcttctctcacttggcccccagaggccgccatccaccctgcagcgacagccccctgtgtacccttgcacagtggctcaggacagacccccagcccctacagtccccgaaagcaccggctaacgtggtgtttgaggagggggcgccgccaggcctccctccgagccacaacctcctccatccttctggcgttagggtcccctcgcctgtatcagtggcccttcctccccacctgtaaacacagggaattactcgcgacaggtcctgcctccgcaggagagactcaaaggggagagctttgtcctggagtcaggtcacagcccagtgcccctgtgagcagctgcaggggtctcagacttgttgcaacagccactgcttctccccgagtgctctgagagctgggggtgggtggaaaccgtgtctcagggtgaagggaccgctggtgggctccgtgggcagaggcactatggggtctatcaagaccctctagtctccatatctgagggtggcccagctgcagcaggggtggtgcctggggtcccgcctggctccgtggctttcctgtcttcctgggatggtttccgcactttcttgccctcatgcaagagagaactggcatgggaggtgggctccgcccccgagtgcttcagctcacgcagacttccttgtggcacagctgcaccaggagctgtgtacatggcaggcatcctctgcgtggtgggcgccttctgcgtggcgggcgtcctctggaggaggggcctcgcctctgggccacttcatgcctcagaacagtgggctgagcatcaaagtgaggtgggccagggtctccatggctcctgatgaaggggacccaggtcccccgtggcttcacattgaggacaaagctcttccctcagacacgcagctgactggctcatcgacactggctgggctctaacttgcagaccaagggacctggacctggacaaacgccctgggctcgcttgctgcctggaagtgaattcccatgagtttgagggcagctgtttcctccccaagcacctggaaaaggctgtcccaagctgacagtcgggccgccgcagagcctaggggacccacgctgcgggcaggggcactgactttctgaccaatgccagccgggagagcctgggcttccgggatctaaggcctgttctcagaggcttgtctgtctgaaaacacctgaactgctccttcccccggctctgggtgtccttgaggccttggctgctggggcctggagcagcccaggtgggggcagagccaaggggtggcagccaggccgtgtaggggccaggatttggggcacatgctgtcaggtcaccagacaccatgaagaccccaagaatcaccaggccttggcagcttagtcgggcgaggggaattaagaggagggcagttcatctccgaagcacaggtctgctgtagactctcagccgcctatctctctgacgggattggtttgccttccagaagttgctgccctagtcaccataccatgtaaattcctcttgctgtgatcacggttttaacttagaaatcagacagagcagattttggacttactgtatttttatttttattttttggcaaacgacgtgcacttcaatagaaaccttcggcgtgaacccagaaaggcgtgttcacggtaagcacaggggctggttctgttaccgggagatcgcttgagctgaactgtgcggttgggaagaggaattactaatgctctttgtagcagagttttattttgcacccccacaacccaggagatcctttgaagatcacaggagagcactgtcctgtgtgattgtcccaggggctgtgtgacgggctgtgcggggatctgagacaccctcgccctggaggctgatgcgcttcagccgcgaggagcaccccggctcctgccccagctctgccaaaaacgccggaggtcggaggcacaaagcgctttcagggactccggtctgggcctcggcctcacagggggctgcagctgggggccagagatcaggatgccatagatatcattttctaaaaattcccacgacgcctccgtgccggagtcagaggtctgccccttccgggtggagcatgtcgccctgaagccgatgggccctgaaagaagccccttttcctctgagctacccgagctgcccccacactgatgcaataaagcaattaggataattactctcgttctggagtgtggctgcccaggaccagggcgggcctgtcagggaaacggcagcacatctgcctgatcctggcctcacagggctgcatgccgataccaattccattacgtttaatgtgatttcatcagtggctctgatgccaagcagcagcctgtggacttcaaagtcaggtcttgatgtcggcagcaccgctccacgtctgcctttcagcgccgcccatgacccacacctcccatgggctgcggaccctctggcaggctcgggggtgaagcatgctcggcgtaaagcgctttgcagacagtcctgggcctgtgggaaaagagcagatgacgaaggcgcaaacctgttgagcccctggcaccttccttccgaccccacgaggcttggggtggcagcacacacgtgggaggcacacgccctggacgccggatgtgccgtgcccgtgagggtcggaggctccactgcacgatgccgcacactcgggcctgaatcccacaaaaggtgagcaggtctgggtgtaaagagagatgtggggctcagctccgacacgcgtcccaaatcctggctttccttgagtaaagaagtcactgcacccggcactcccccgcacccttcttcaagggttttgtccatctcatctaagttgtcacactgactggcctaaggcttctgtaacatcccaggcagctcttcatggtgccatcttagttactggagtttccacggtgcctgcaatcacacagcctggctatggcttcctggcctttgctcgattctgaccccaaaatggttcacactgtgggcttacgtattccacatttcagccgttgctttttcttcttgtgttaatgaggaccaagacagtttgcacacaaggagcatcagaaggccctacctctgggtgctgtagccaggtgtgagccctccagagccatgagccacacaggtgtgagcctcgcagagccgtaagctgcacaggtgtgagtttggacatcttattttatttattttattattttcttttcttttttcttttcttttatttttttgagctggagtctcactctgttgcccaggctggagtgcaatggcacgatcttggctcactgcaacctccgcctcccaggttcaagcaattctcctgcctcagcctcctgaataactggaattacaggcgcccgccagcatacctgctaatttttatgtgtgtgtgtgtgtgtgtgtgtgtgtgtgtgtgtgtgtgtgtgtgtgtgttttagtacagacgggatttcaccatgttggccaggctggtctcgaactcctgacctcaggtgatctgcccatctcagcctcccaaagtgctgggattacaggtgtgagccactgcacccggccagacatcacgttttaactttgccagcttttggaattatgagttctctggcttctctttatcctcccgtgggcctgcgatgcctctgccaggcaaacactcacaccaaagtgggctccagcaggaatggggagacagtggcggtgagcatctgcacacctgcagccaccccaggacagccatgcagacgtcctctccagacagaagccaggtagggagtcgggggagggttgggagggggaaggtacagaaaacagatttccagcttttcaattctccaggggtcaaactaaaaatcaagtggtctcctctactgatattgtccaggtctgagaattcccagcaacaaggaccctggctcaattcccagaacatacgcaaccgagacctctgcaccccaacacagcccagttcatcaggaggaagtgatcaacggtggtttggctccagggggcgtcacggaaaacccaccctctgcccctgtgcaggtggcacagaggtgccgggacacagagctgtggggctccacctacagggatctgctgcgtgctggccacagagtaggcagacccacccccgccctgagatgccgatgctctgtcctcacaaaaccaggatggggaaagaaaggggaaattattttttaaaatagcgtcattaaaggccatctgttgccttcaacgctgtgacttgatggccacgccattgatcacgtcctgagtgaaagagaccttcactttgacacgactgaaataaactcatttaaagcagaaaacctggccgaaacacgggggaaatgctccagggctccaggagaagccgtctgtgcgtgcagccccggtgggatgtaggctggagacagccctgagtcaggaagtccggcgaggccatctgggtccacgtggctttttggtgctgtccccgcagcttgaggcaaggaaggtggagaggcgccgcctgccccgcctgtgtctgcaaggaaccgtgctgactccatgatggctctggcccagccccaggaagccatgacccgcacaacctgaggatccacgaagcccagccagggccggccccgaaccgggtggagagcagtggggggtggggtgggggtggttcttgtttcagtgcagtcaggtggcagccaacccacacatacagccagcctggccaccagcactggggccctgtctgttgccccaacccgctgacaccctgtggcagcggcaagctcagctatcctgtgcatggcacggacatgggttgggctgaggatgcccactgcctgccgctccagggcctgaggggagctctgggagccaggcttgctctgccacacgcctggggtggacagccctgggccagcgcagcagccggagtgagacggagcaagtacagtgagtgccaggctctgctccagcccccgcaggccgatgcgtctggcctggcattctccctgacttgtcagcttcccagctcagagccctcacctcacctcacactcctggacatcaaggggcaccaagaagccactgagggaacacagcgtcccccgccttgctggagcccacgagaggatgcggcttcctgcagctgcgccctgggggctgcctgtttcaggctctggctctggctgggctgattgtctttccagggctcaaagcacatggttttcatccggtgctcaacccagggaaggccgaggacagtctggctcagtgtggtgacctctgcactgcctgtggggacgcccgtctctgctgcgtggtggtgacctctgcatcgcccacaggacgcctgtctctgctgtgtggggtgacctctgcactgcctgtggggacgcccgtctctgctgcgtggtggtgacctctgcactgcccacaggacgcctgtctctgctgcgtggtggtgacctctgcactgcccacaggactcctgtctctgctgtgtggtggtgacctctgcactgcctgtggggacgcccgtctctgctgcgtggtggtgacctctgcactgcccacaggacgcctgtctctgctgcgtggtggtgacctctgcactgcccacaggatgcctgtctctgctgtgtggtggtgacctctgcactgcccgtggggacgcctgtctctgctgcgtggtggtgacctctgcactgcctgtggggacgcctgtctctgctgtgtggtggtgacctctgcactgcctgtggggacgcccgtctctgctgcgtggtggtgacctctgcactgcccacaggactcctgtctctgctgtgtggtggtgacctctgcactgcctgtggggacgcccgtctctgctgcgtggtggtgacctctgcactgcccacaggacgcctgtctctgctgcgtggtggtgacctctgcactgcccacaggacgcctgtctctgctgcgtggtggtgacctctgcactgcccacaggactcctgtctctgctgtgtggtggtgacctctgcactgcctgtggggacgcccgtctctgctgcgtggtggtgacctctgcactgcccacaggacgcctgtctctgctgcgtggtggtgacctctgcactgcccacaggacgcctgtctctgctgtgtggtggtgacctctgcactgcccgtggggacgcctgtctctgctgcgtggtggtgacctctgcactgcccgtggggacgcctgtctctgctgtgtggtggtgacctctgcactgcctgtggggacgcccgtctctgctgcgtggtggtgacctctgcatcgcccacaggacgcctgtctctgctgcgtggtggtgacctctgcatcgcccacaggacgcctgtctctgctgcgtggtggtgacctctgcatcgcccacaggacgcctatctctgctgtgtggtggtgacctttgcactgcccgtggggacgcctgtctctgctgcgtggtggtgacctctgcactgcctgtggggacgcccgtctctgctgtgtggtggtgacctctgcatcgcccacaggacgcctgtctctgctgcgtggggtgacctctgcatcgcccacaggacgcctgtctctgctgcgtggtggtgacctctgcactgcccacaggacgcctgtctctgctgtgtggtggtgacctctgcactgcccacaggacgcctgtctctgctgtgtggtggtgacctttgcactgcccgtggggacgcctgtctctgctgcgtggtggtgacctctgcactgcctgtggggacgcctgtctctgctgtgtggtggtgacctctgcactgcctgtggggacgcctgtctctgctgcgtggtggtgacctctgcatcgcccacaggacgcctgtctctgctgcgtggtggtgacctctgcatcgcccacaggacgcctgtctctgctgcgtcgtggtgacctctgcatcgcccacaggacgcctgtctctgatgtgtggtggtgacctctgcactgcctgtggggacgcctgtctctgctgcgtggtggtgacctctgcatcgcccacaggacgcctgtctctgctgcgtggggtgacctctgcatcgcccacaggacgcctgtctctgctgcgtggtggtgacctctgcactgcctgtggggacgcccgtctctgctgcgtggtggtgacctctgcaccgcccacaggacgcctgtctctgctgcgtggtggtgacctctgcatcgcccacaggacgcctatctctgctgtgtggtggtgacctttgcactgcccgtggggacgcctgtctctgctgcgtggtggtgacctctgcactgcctgtggggacgcccgtctctgctgtgtggtggtgacctctgcatcgcccacaggacgcctgtctctgctgcgtggggtgacctctgcatcgcccacaggacgcctgtctctgctgcgtggtggtgacctctgcaccgcccacaggacgcctgtctctgctgtgtggtggtgacctctgcactgcccgtggggacgcctgtctctgctgcgtggtggtgacctctgcactgcctgtggggacggccgtctctgctgcgtggtggtgacctctgcatcgcccacaggacgcctgtctctgctgcgtggggtgacctctgcatcgcccacaggacgcctgtctctgctgcgtggtggtgacctctgcaccgcccacaggacgcctgtctctgctgtgtggtggtgacctctgcactgcccgtggggacgcctgtctctgctgcgtggtggtgacctctgcactgcctgtgaggacgcctgtctctgctgcgtggtggtgacctctgcactgcccacaggacgcctgtctctgctgcgtggtggtgacctctgcaccgcccacaggacacctgtctctgctgcgtggtggtgacctctgcaccgcccacaggatgcctgtctctgctgcatggtggtgacctctgcactgcccgtggggacgcctgtctctgctgcgtggtggtgacctctgcactgcccacaggacgcccgtctctgctgcgtggtggtgaactctgcactgcccacaggacgcccgtctctgctgtgtggtggtgacttctgcactgccgttcttgtgaggaggaagtatctcagtttaatttcagctgttcttggggggaggaattgtctcaatgtagatacgctcagcatttccctaatagccagtgcatctgagggatttttcaagtgccgtgagagccatttgcatgtttccttttgtgaagtgcctgctaaaatcctttccctctttaaaaaatcaaattatctttattattgaactttatgaattctttatgtattccagatacaggttccttgtcaggcataatggcattgtgaatattttctcctgatctgtgccttgtcattttctcggtggtgtcttttgaagaacagaagactttaattttgaggaagtccaatgtatgtgtttgtttctttttctttcagggtctcactatgttgcccagtctgggcttgaactcctgagctcaagggacgctcctgcctcagcctcctaacatgctggtgttaaaggtgtgagccactgcacccagccattttcttcttttatggttaatttttttgtgtgtcctaagagacttttgcctatcataacattacaaaatattctatgttaccttcaagaagtgttaatggttttagcttttatgtttgcaatccatctcaaattaacgtttgtgtgtggtgacggaggggggttcacttatccaggtgcatatccagaacttccagcaccaactggtgcaaaggcttctttctctcagttgaattgacttggtggcttgtccaggaatcatttgatcctgactttggtgtgggactatttcttggttctctattttgcggatgcagctatctgtcctcacgccttgtgatggttaatactgagtgtcagcttgattgggttgaaggatgcaaagtactgatcctgggtgtgtctgtgagggtgttgccagaggagattcctgtttgggtcagggggctggggaaggcggacccaagcttaatctggtgggcaccatctcatcagccgccagagaatataaagcaggcagaaaaaggagaagaggggagacgggcctaccctcccagcccgcatctttcttctgtgctggacgcctcctgccctcaaacatgggactccaggttcttccgttctgagactcgggaccggctctccttgctcctcagcttgcgggcaacctatcgtggggacttgtgatcgtggagttaatactcaataaacccctttatatatatatttctcctgttagttctgtccctcgagggaaccctccacacacctgtgtcacactgtcttcattacgatcatttttcagtaaatcctggaatcaagtagtgtgactcctcctgcatctttattcttcttcaaaattgttttggctatgtaggtccttggcatttccatatacatctaagagtcagtttatctgtttctggaaaaaacaatccttctgggattgcttgggatgtcatggaatctatagctcaaattggtgacgatggacagtttaacaatatgaagactgattcatgaacatggtatacctctccatttactgaagtgttccttactttcagcaatgtgtgctatctttcgaggcatacaggctgcatttcttttgttaaaatttcctattttatggttctgaatgttattataaatgctatacttaacattttcattttgacattttctcccagcatatagaaatataactgatttgccaggtgtggtggctcacgcctgtaatcccagcactttgggaggctgaggcaggtggatcacaaggtcaggaggtcgagaccatcccggctaacacggtgaaacctagtctctactaaaaatacaaaaaatcagccaggcgtgatggcaggttcctgtagtcccagctactcgggaggctgaggcaggagaatggcgtgaacccaggaggcagagcttgcagtgagccgagatcgtgccactacactccagcctgggtgacaaggcgagactccatctcaaaaagaaaaaaaaaaaagaaatacaactgattttgtgtggtggccttgaggcctgcagctgacgtccagctccggcgggcacagaggctgtggcttctccttcccttctgcttggcaccctcatcgggagggccacggggctccccctgagatggctctgaggaacccagtggttagggcatctgaaaccctccaggccacagaaccacaggtgctggtttctgagtgaatccgccaagctgacggtgcggcgctggttgtgacccaagtgcgcgagcgggggaaggggtgtgcgtgccttcctagccggctctgtccacagggtggttcatcagcaggtggacactctgctgctgtcactttcttatcaactcaccctctgctttccaccaaaggaacattaatcacacccaacacaggagtctatcaagtaattataccttttagtgcacctgataatttcttctccagctggcactagcaatcaatcaaaatgccataaaaggtgcttcccatgagcagatgagtccctgcatccactaggcattgtgggagctgttcaactcttggcaccaggagctttgcatacaaccgcctggcggctcctctgcggggccggctcctctccctggagctctgcttctctcccagggcttcggcctgacagcgcttcccccacccggctgctgtccacagagtccttggaaatgctgcatccacatctgtgcatattcaagccagcagagggtggaacctaaaactaagccctggaaagatcaggacccacagcctgtgagaatatctgtattctggctggagacaatgaagaatttcaatgttccattaaaaggagccatggaaacatctctagtatttctaattaaatggaaaagtaaacccggagacagcatcccactttcctgcgcgatctggatgccgggttgcagctatgccctcctccaacaagccatggccaactgtctgcagccactcacgcacccctcagccaggaccctgcccgacaccacgtccagaaagctctccaaagaccccacccacccatgtttccctcccgctgtgccatggccccgagcacacccgaccaggcaaggaggcagagatgggaaggccctggcccttgacaagccctgggggcctgctcgtgccctcgaggggatggggcaggtcaggccctgctgcctccagctgcttccagtgccctccccagacacctggcctcgtggacagaggctgagctcaccagcccagaggtcaccaggctgcagcatgcgggagcggctcctgggaggcggagccagcccgcagggttcacacagtaaaaacagtgaggacctagagtaagcacccaagactccccacagccccagaaaaccaacctgtcagggatgccccggtgcccgccatccacaggtatgcagtgacattgcggacgggtgcccaccacccccgtgcggctggggcaggaacacctgggttgaagctggcatgccacagagggcagagaggaaagctggaggctccctgcctgggacaaccctctggacaccttgtcctggggggtgagaggggccctggtgttgaggtccctctctgtgggtctcctgctagtgcagctgagcctgcagtgacccctcccaaccccggcaagtgctcatcatgagaggccatgtaaccctcccagaaaaggaataaagggaattaggtgctcgcataccaccagggagcacctcaagaaatggccagttcactccatgcatggctgacgtttctgcagcactggctaagggctggcgcaaggtgagacgcagggatgtgagtgagggggagggaaaaggagggcgctggggaagatgggagccacagggggacagagccccgagctgaacgagatggaaagaagagctatgcccagacatggacgttacgatgcagggaacacacggtgaggaatgggcccagacagcccctcacagtgcaccaaagcacactaaacactacaccaagccacgccacacagaaccacgctatgcgctacagcgagccacgccacacagaaccacgctatgcgctatactgagccacgctacacagagccacgctacacgctataccaagccacgctatgcagaaccatgctacacgctacagcaagccacgctacacactacactgaaccatgctacacgctacaccgagccacacttcatgctacatgataccccaaaccacgtggagtcatcgcttcctgagtccgtggccagtgctgtcttaggactgggtgtcccaagtgtccgcagctgccccggggggacagggtgggaggagccgcccagcactcgggcccctgcctgcggcatgacctgaagctgaacacaggcacggcagccacgcctcgaggccagggagagaagaggaacgttccggactgaaggagtggccgagacggcggcacactctggccgtggccctggcgtgagcgcgctgtcgggtggggcaggcacaagttccttggggcagtgcccaactcttcgtacgtcttcagcgaatcctccacgaaacacttaagcaaacagatgctcagagagcatatctgtacgacatggtttccaacacaaaaacatgaagattttatcattccagcccaaaatgaaaatcttactaccaaaccacgtgaagcggaagagcaggtgagagctgcgtagctctggtcagtgtggcagacgtcaaaaggaccacgtcgctcctgcttttaaagtgcacatcgtgtttttgtgaactcagaggtcacattactgaagctgaacagggggttggcatgtgattcaccgtttgcagggcagacgcagatgagcagcccctggctgggcaggaagcacgcacagcccgccgcccccacaccagggcccaggagggaacccgccacccccaccccggggctcagcagggaacctggacagtctggtcgtcctgagagacgtcaaagccaagcaggcaaagcacccgggaggaaggacgcagccaagagaccatgaggaggccgcgctttccctgagcgtcaggacggcgggtctcatacctccctcacccttgaatatgtctgccaacgcgcccaccatggcctgagactctgtcatttaaaaacgagctctgaaatatttcggacactccgggaagcaaaggagggctggtgggggaagctcaggagggctggtgggggaagcagggcgtccagtgctcctctctgagtctcctcctgaaacagactcagaggtgtggttctgtcccagaaacagggatcatgagcatgcccgggaaaagccagccggtccccagcattcaaacacaggcccctgaaggggcagaagagtgcgcagctggccaggccaggccgacaggaggacagagggcggcgggggaggaaggaaacagcctcacctctcctagaagcctcacaggttagaagagccaccgttattccccaaacaccacgcagaagagctccacttactgctccaagcatgatcctgaagatcagccaccggaagccccacaggacaatccgggatgtgggggtatgctggggcagccttgacagcgtccacagagggcacaggaagatccccaggaaccccgtctccagaagctgggactcccatcctaaaacaacgagacataccaaaggtgagttaatggaagccacacatttcacaaagaaatcatttcagaaactcagtttaatggaaacggtccttgagacagggctgatcttgctactgagagacaccagcccgcacgtattagtctcaacatcgacacgcaaggtcaggtctgcaggagtgggagctctggcgtgggacccagggcctaggtcgggacttcctgtgacctcggcacccttcgccctggagggaaaggccccgctctgaggtccgccacctgccaccctgcaggacgctgcacggacctgacatctgagaatgcgccctgcacacatgctgccggcagactttgggggaagcttttcccctcccataggtttgcatgaaaacagctttcaccttcttcccagcccagaaacagcatggggaggcagcactggggaggcagcactgggggggcagcactgggggggcagcacttgggggaggcagcactgggggggcagcactgggggggcagcactgggggggcagcacttgggggggcagcactggggaggcagcaatgggggggcagcactgggggggcagcactgggggagcagcactgggggagcagcactggggaggcagcactggggaggcagcccagcctccatgtgaggcagtgtctccctctggccctgtccttcccagatgggcatggaagccaggcaaggatgcagaggcaggtcatggtgggtccacacggaaccaacaccggtcagcccctcgcagtcccaggataaggcagcagctccgccactggatgcgggggacacgtgggggcccaacggattcttcgcactggaaacccagcataagaatgcggatgcgggtcgccattccagtgctattctcagaggtgaggccaccgtgaatgtggctgctggaaactgcccacagctcgcgtctgtcaatggaaggtcacatcccagggccccagagaccccacaggccgggctccctcctgggctctgaggatgctggatgggacagaggccacccgctgcccagcatgacaacgatcacatgactcacaccaccacagtgtctatgcgccacagagcggatgggagagtgcggaggggatgcagacagagactcgcaggggcagcatctacacaccacagagcagatgggagagtgcggaggggaagcggacggaggcttgtgggggcagtgtctacctgccacagagaggacgggagagtgcagaggggaagcagacggaggctcgcggggagcttcctccaaccattggtgcaactcatctctacctgagatactacggtaaagtcaaaagcccgtgaagaggctgctacagcagcactggactgtaacccaaagtacaaaataaacgcctgcaagtccacactgatgtgcgccaattactgaataagcagatcggcgtgagtggaggcagcgcgaccctggtctctgaatggacagacggtcagtccttatgctgccccggcttatggagggcacaggctgccaagctgacgcctgctggtctctcagcgggaccccctccacctcgctcacgccccaggctcgctgggccccatcttccccacggaagccagagccgcctggctggctgggccttgcggacaccctgggaagaaaagggttgccctgggcccacctgcttctgttttctttgcttgggtcttgaggaattccagcagctgcgcggcgtgcacaagggctgccattgttctccgcctcagcgtggcggacaacgcgtccccaggaaagtcaataagcagcacgctgccagggcggcctcagcgccaaggtcagggccagggctctccagacagctctcacccagcaaacaccagcgctgcctgaagcgagccccaggcacccgaacgaggcggcaacacgcagggccacagcacacgctgccactgccggggagaggagccgtcctcgcccccgcctcagtgcctttcccgttgcgcagctgcacgcgctgcctgctgggcgccagcatctgcacgccctgctcttccccagggacctcccttccctttagccagggggacggctccgggagggcccctgctccactccacggctccggcgtcgtttccacctcgtgctgtgctgggccttccgggagactgagcacaccctgtgaggagcctgacgcgttctgcctgggtaacggggcagtagctcttgtggggaacattcacttccacggccgctgctctccttcctgcgacacagacagcgttggcccaatcagcggagaagctgcatgtgcacggtccagggagatgctcctgagccctgcccgctggacagggtgcgacacccaactcctgccctggcgcctcgcccggtgcacccatgttaatggctcattgccggctggatgccccgatgctggtgcggaggaaatgcaggtgccccagcacccaggcacagctgggcactggtgcttctcagctgccctccccctcaggattcatgcagatccacagccaggctggtgcccaaggcaggagcctgtggcctgcaggcccagccagcgctgcaggtaactgtactgtgccattcacaggcgtctcggggcatcagaaaaggcagaaacaaggacgcagcctcataactgccttgctggagacagtttagggtttgaaggctctggatgtcaggtctgcagccaccggaggcgtggggcacacagaagagaggcttcgccatggggcagcccgaggcacatggcgaggccagggccagacctgcaggcccccgacaccccgacagggattctgacgcctcggtttataatggaaatttaagatgaaatactcggaagagaaaatctgcagacaatggcgaatgccacatggcgcctcttggagtggcttcccagagctctagactttggaatcagttctcaccattgttgatgggccgcgaggcctgggcggctgcagctacacgcacggtcttctgaggccctacgagatgctgagccctggggacagggacatccccaccactgcaacctgggccaccccgacccctcctaggaggggagataacatctccaccactgcaacctgggcagtccctgacccctcctgggaggggagcaaacgtctccacgttgaagggggactgcaggttgcttcagtacaaacccttccagcaccctgtgaagacagccctgacccaaatggggagaaggctgggcaggccaagacccggggaggctccccacacccgaccttcctgctctgcaggacacagaccggatgctcactcgtagggtccacgagagaacgcacaccgctgtgggccctgagccccgtgatcgctccagctctccaagtgcaaaaccagacacgctccctccctcccttccatgaccattggtgacacactccctccctccttcccatgaccactggtgacacactccctctttccctcccttcccatgaccactggtgacacactccctccctccccatgaccattggtgacacactccctccctcctcatgaccattggtgacacactccctccctcccatgaccattggtgacacactccctcccacgaccattggtgacactctccctccctccccatgactattggtgacacattccctccctccctcccttcccatgaccactggtgacacactccctccctcccttcccatgaccatctccctctctcccatgaccattggtgacaaaattttactgccttggaatcagatggaaacgtggtttctctgaactaaatatccgagtgctaatcagtaatgttccgtagtgactgacgcagagggccacacagctctcagccctaaatcggcgtctctaaggactccggcctcgctgctgcctgctcggctggcccaggaggggcatcccccgaggcctgagggcttgtagggttttcaccatctcgtgctcgcttcctagatggcagggtcctgggctacttgttttaataccactgatttaaaaacagctaaagaaaaactcaccctagatccgcctctgcagagccaaggggcgaccaagggatgactctggggacattcaggctgggcaggccctgtgtgcataggtgtgaggcatgggtatggatgggtctgaaacaccagaggagccaggcacaggatgggggcagagggcaggcagagaccacagggtggtgcggagagccctcttcatcctcacaacggccggggtccctcactccgcagccaagctcctaggcacctgctccccaaataaaacccaggcagaggtgcgtgctcacctttcttttctatttatgggaatcagaggttgaggagggaccctctgccactgaagaaccagaagattctccaccaagaggcgagatctgcgcctggcggcctggggcatgtgggaacatgtggaggggcacctggcggctgctctgggctgggctgggcagccggcagcacactcatgcaccaccagccttggcgaccccagtcagaggatggagggtcccaggccagcctagggacagggtgcagtgctggccaggcagagtgctggggtggagcctgagatggggttttccggacggaagtcctggaggccagcagccgtgtgggacgagagacacgcagggtggggcgactgcggtgcctcaggcgggtgagatgagcaccatcaccgggggccggagcaggtgagatgcaggggccggagcacgtgggacgcgggggccggagcaggtgagacttgggggcctggggcaggtgagactcagcagctggggcaggtgacacccaggcgctgcctggccaccagtgaggggcagaggctcggagggtgcagaaggtgtgcagggtgggggcagccctcaggacacagggagggacacggggtagcctccggcaaagggagggatgaggggccagtgggttgtgggctgagccgcctctgaccaaggaagaaacgtgatttaacacaacgctttggaggtgcaagtcattgcaatggccactgtaggagagaacgccagctgaggcctcattaactctgtggaaactattttagttacttagggagagtcattaaatatagcacagatggatccttcaaaaatgacagccaccatccacgttagaaacaggaaatccattaagttcgctgttaaaatcggggacgagggagcaaagcgcttccatcttgactgcctgtcactcagctctgcgccgggccgccctctgccaccccaggggcttctaatggcggccccagagagagctgggagcttttaaaagtttccttcatttttacaggttatattttaagctgaaaagttatgaaatagcactgcaaatcttactttgcactatcacggaacaggggctgtgggctacagacgcccctggggctggatgatgggggctggggagttcggctctcgctgcgcgccagtggcggggctgggcactggtaggccacacccacatggccccgggacaccaggtggccttgtctgtgatccgcccacatgcagagccccagaccccacttctccatgtctctggccacggggaaaacatcttttgtgaccatgtttgaaaaagcttcagagggacaagtgcaggctctgccactgaggcctgcggccttgggatgcctcgttggctccctggcagcaaatgaaggtatgtcaggaacacccctctcctggcaactagccacctcccgggtgtcccctcgcagatcctctgagtgttgagctccgggtctgttatggccattgctctgcacagccagctctgggatcccctgaatattgagctccgggtctgttacggctatttctctgcgcagcgagctctgagagcatgagtactgctcagcgtcggggatggagacgccacccaggggctgccatgctgcaaactcatcttgaaggcagagctaaagtcacgtgtatggggccatctgcagcccagcacacagaagcaatcctgtggggaaccaggcccaaagccactctcatgccggtaccatgggggacgggtcaccaccatctcacctcccccaagcacatgggcaacacacagccatggtgtggccacgcagagcacatgctgcgcaggcccacgtgaagaaatgccacacgtgtgcactgcgggcgggcacaggcccacgtgaagaaatgccacatgtgtgcactgcgggtgggcgcaggcccacgtgaagaaatgccacacgtgtgcgctgcgggcgggcgcaggcccacgtgaagaaatgccacacgtgtgcgctgcgggcgggcgcaggcccacgtgaagaaatgccacacgtgtgcgctgcgggcgggcgcaggcccacgtgaagaaatgccacacgtgtgcgctgtgggcgggcgcaggcccacgtgaagaaatgccacacgtgtgtgctgcgggcaggtgccgttctaggggcttgtccaggcccgctgacccctccggctcactggagatgaccaggcagggctgccctcccctaagagacatgcctgcccccgtaccggggctgtttgcaggggtgctgggaggtcctgatgtcagccccaccccagaggtgtcccaggggacaggagtactgctgtgctcgcccggcacccccggcctcctcctgaccgtgggctccttccctcctctgggattgaccaggctgtgtctggagtggactgcagctccctggcctgtggtcacccagagccaagctctgcacaggaacctccagaaccggcctgagcttcacagctgcgtctgcccgctggccatgtctcacgtcctgaggacgtttcacaggagggccgcccttctgctgcccgcaagacatacaggtgcagagctggggacatggcgtcgggacgtggcgcggggcggctggctgggttaaaccagagatcagatggcaaatgggagggcattttctagtaaccagacatctctgaaagtgctggttaagggctttcgtgctttagataaaattacgttaactgcacgctctcagttatgaggaatttcgtggactgttacatattttaaggctgtccgtgggcgctgccgagaaacaggaagtggcctcagtgacccctgcgcccggccgcgcggcttgttcgtacttggttgccgtgacaaccagacttcctagccccaggtgtccctgtggctcagctctgtgcaggtgtcaccagctcttgggaaacaaatccgcagtaatgaccttagctatctttattggttttggataaatacgaaaatgcttcccgtccacggaaattagacttcgcggcaaagagtgtttaggattaatgtgttccaagtatttcacctaagtcaggctggtgggcaccacacctgaccatttctttgtcttttgtgtcccgggcatgaaaaatggctgaagtgtgccgagcctccaagggactcatgagaccccagaaaagtgctggccatcgtgggctgcggggacgttgtgcccacggagctgtcctgggtcacggggtgtgcctcaagggccccggcccttcaggccttgaggcactcaaaggcagcctgcgtggctgagaagcacattttaaatcacatttaactttggttcacttggatgtgaatttaagtgaccacgcggggccgacgtcccggggcgcaccccgactctcacgcggggccggcatcccggggcgcaccccgactctcacgtggggccagtgccctggggtgcaccctgactctcagccagtcctggggtgggcgcctgctcagagacacctgtgggatgtgggtctcactcccgagtagcggtgggacgagctctcggcacctgctcctcccacggggcctcctgggctggagcccgcacagcacagtagcatccacatccctgctgtgacacctgtgtgggcagtcggcatgtcggcgtggactcccaggctgcagaatcaggtgttcccctcaccacacagtctcgggggacagtctgttttcactcgcggcttttccagaccctcccctgacactcggcagtcggcgtttccaggtgtgctcagtgtggccaacaggcacgatccaccccacgtggagggtggtgtgtccaggggctatgtgagctcacacactcacagggaaggaacgtgggggttggcacacctgagaagtgggcgggaatcaccccacatgcccgcggcagggggcagggcagccctgtggcctctgcttcatctctgtcaggacctatggtggacacacacagctcctgccccaccttcatcactgctgagcccccctgggaaagctcatatctccagcgctcgcgtgaggacagcagtgccggcagcaccagggcacaggccccacagacaaggggcccggaggccgctgggggcattccacccacagacccgctctggacagtgtgcgccctcagaggcagggagggcgtctggaccgcagtctcatgtgggtcactcttgggggcctcgggcagcagcaactgaaggaggcagtgatgacctcaggcccacgtcctggaggtcttggggagaaagacaggaagtgttttcctagaaacactggtgtgcagagaggactgggtttcagctacatcatgtggcagggccgccctgggaggagcctcacggagacccacagacagaacgtgggggtgagggtgaagcagccagcatccacaatgggctccccaccccacagctccgccccgggacccccttcctccgaggcagtcaggctcctgcccccggcaccatccttccggcctcggtcaagactgcccggacaccacctccagggccttgctggacaggacatccacactggccccagcctgtcggcccccagcacaacatctgcaccggccctggcccgtcggcttagcccccaacacgacatccacaatggccccagcctgtcggctcccaacaggacatccacaccagccctggcccgtcagctgggcccccaacaagacattcacactggccctagtccgtcgtcccccaacatgacatccacactggccctggcccgttggctcggcccccgacacgacatccacaccggccccagcccgtcagcccccacagcacgcactgcatgtccacattcccctctctacacaccacaccccaagcgctggctccacacggacgcaggaaagcatcaggaccggaaagcacaggaaaacgtgcttgccaggcaggcgggctggagagctgagcagagacacagagcctcggaggaaggccaggcccactccagagcaagaactaaaatctccagagcacaaatgcccctggctgagctcagcagcagagtgaagaacgaaagaaaaggcagtgaacacgaagacatagcagccacagtgactcattctagagatgagaggcttttagaaaacaccacacagaagcacagggcccaggagctcgtggaaggcagggagaggcctgatgtccatgtccgtggagccacaggagaggagaaagaacatggggcaacccccccaaatattggcaaaaattatccaaatttggtaaaaagtaggcatatcatagtcaagaaactggcaacggaagataaaatccccaaagccatcagagaaacataacacgttacactggaacgtcaggaatgatagtcgacttcccgtccaaaacgagggacagatggagagagggagccaggcgcggatccttccccaggggcccctgcatgcccagagcaagcatctgcaggcatctccagcagcaaaggacaccgctgttctccccggggagcttcagtgtcatcagagcctgaaggaggaagcaactcggcaccacgtggcccagagcaggctcgtgagctggcctcggtcagcaggtcgcctgggtctctgtctcagtgctcagcagggcgaggacaggacagaacgggccccatcacagactgcgcttagaaggaactcagtaaaacaaagaccattttcttctggaggcaactcaaggaggtaagactgtgagtcaagcgccttggaggataagaagtccaggtaagtagaaggcaggaggaagcttccctaatatcacctgcaaatctgcttccactggggcattctgttccccttttcagacagcgcagagccctcctgcggtgaacagtcgccatagcccttcttgaggggctgctgggtccaagacctcctgggtgggcacacggacctgcgctccctgcagagacgtggacaaggcaggccctgtggaaagttcacccgccagccaggcaccggcacaaagccaaaccccccggcggagtgtgtgggggcagggacaaaacgctccacgcgttctcacagggactcgcccttagaacaagacagctgtatctctgtacaaatgcgggcggtgacgagtggggatgacgggactttctggggtgacggccactccctataccttgatggggctcgtgcaagttctttatggagggaaagacgcagtgtgcggtgagttccagctaatgatgtgggaagcattgacaccagccccaccctgatgtgcgctgaagcaccgacgcagggacgggggacacgggcgaggagacccactacgtaacaacgcagcaaaccccgtgaacagaacctacggcatccaggcggtccccgtgcgggttttactatacaattcttaggagaaaaacaaaggttaaaaggtttgaaatgtaaaaaagattgactacatagaaaatttaaaaacaaaacataagtaagagaatctacagaaataggcttagccgctgagaggtgttagcaaggtctgggcggaacattaaaaatcctgtgagtgggcctggaaaccagcgttcccccacagctgaggagtaaggggagagaagcagctgtttatcccagatgaggtccagagagacgcattccaagcagccaacacgggacagaggcgatgagggagggcggcctggacagaaaacttccaggcagatcggggcaccctgtctcgcaggcccagccatgctccttggcagcaaccacccaggggctttctcacaggcagaccagggcagcctctggtccctgcacaatctcgcctccgatgcaaggtgggagaaggcagccacctcccgaggggggccacagagggggttctgatccagctgtgagctctcacccccagcccacagcgactggtagccaggtaggcagaatggcaggcagagcggccactggggaactgatccagcaggacctgaagcagggagacagcacacgggcgtccacctaacgtggccagcccttgtgtggacaaacagctgagaaaaggcattactaacatggacgtgaagaaagtcgcctcggtttttgggtgtgatgtggtgttggtgtcgtgttgttgcgaaggccctgtctgaaagtcgcctcggttttctggtgtgatgtggtgttggtgcgtgttgttgcgaaggccctgtgtgaaagtcgcctgggttttcgggtgtgatgtggtattggtgtcgtgttgttgcgaaggccctgtgtgaaagtcgcctgggttttcgggtgtgatgtggtgttggcgtcgtgttgttgcgaaggccctgtgtgaaagtcgcctgggttttcgggtgtgatgtggtgttggcgtcgtgttgttgcgaaggccctgtgtgaaagtcgcctcggttttcgggtgtgatgtggtgttggtgtcgtgttgttgcgaaggccctgtgtgaaagtcgccggggttttcgggtgtgatgtggtgttggtgtcgtgttgttgcgaaggccctgtgtgaaggtcgcctgggttttcgggtgtgatgtggtgttggtgtcgtgttgttgcgaaggccctgtgtgaaggtcgcctgggttttcgggtgtgatgtggtgttggtgtcgtgttgttgcgaaggccctgtgtgaaagtcgcctgggttttcgggtgtgatgtggtgttggcgtcgtgttgttgcaaaggcctgtcttcaggtgtacgaggaggcatttccaaatgcaggaatgtgatgcctgggatctgcgtcatggcaaaacagcaggggcaaggagtgtggggcggatgtggcagctgctaacactggcacggtgcactgtggcctacgagggtccccagctgtccacagttcattcctccccattgcgtggcttcctgaacagccatgtatttcctaactctgccggctgaggggctgagaagctgcagcaccccagtagtaacgggcaccccagcacccacgtcttggtctctaaacaccttccccactaaagcatcaggcttctcagggaagccaatagtcccggctactcaggaggctgaggtggcagcacagcttgagcccagtaggttgagactagcctgagcaacagagcaagatcccagctctaaaaaagagaaatcctccctaagagcactgctttagaaggacgtggaggaggggctgtggactctgagccttaccctcaatacaatgaggtcacctgctcctgggaaccatcttaggatccctggaatgggcagagggacaaactcatcagtggcccccaatctggcagagttaacctgccccacaatctccaaatccagaggcctacaaagcatctgctccaagcagtaacaatgaggtcctgagcggaaatcttcacaaagtggagagaaaaaactgatggattgtccaatgtgtttgattctgtaaaaacaacagtattggaaagggttgaccagttgtgctggtaaagttggaacaaatgagtgagatatgatcagagatgaaaaacgaagccaatcaaaatagaaaaggcaactatgaactccaggaaaaatgaagagttattagaaaaaaagttactatagttcactatttggctcagcagtcacaatatttacagagtcaaaataatgtaaagacaatcaaactaataaaaattatacttgtgacacagctatactgatgatgatgagaagaacattagggtgtgtgagggcaatccctgtcgttcataagaggacatgtatacacagtgtctaaccgtggtatgcgaagaataacccatataaacctatcagtcagaaagacagacaaataccagagttaagtgcaggaagtgataaaagggttgtctggagaacagcatgtggctgagaagtggtacggcaagggcttctgtttttattataagtcgtgtaatacaatttgactattcatgcacatgcccatttttttttaataattaaaagaacaatcttcaggccacactggccacagtgtaataaaatcaaagttgagaaacaaaaggccacctgtaaaaccctgagcatgtggcattttcgaagcatttctccaggctgtccttggtctagaggcattagcgctgaaggttataaaaccacaccatcggccactgtcaggggcagccgggggtctcagatgacagggtagggcagggacatacccagaagtgggtagccgccctccagttggctttcattagcagagaagaagagacagaaaatagctgaaccaactccaggcactggaaatgataaaccactttctcccagaaaaagcaagcaactacaagaggcaaaaacgaatgagctagagtatattttaaaattctgatagataaaaccagctctttgaaaagacccataaaggggatgatctatggcggtttaggcaagggagagtgaggaaaaggaggaaacaagtattgaggcccaggcgggagaacggatgcagacctgctagggggtggcaaggccaccgcacagactgtgccctccagccggcagcggggggtggaggggaggagcgggtgcagtcagacccccgtccgcagagtgctgggtgcgagtccccaaatgcctgctgggctgagctgccccctgcggaatgggtggtgacgaaaccgccctcttcagccacacaggaagccccttgctcactgtcactgtcactaatccactaggaatgaagagcagatgccaccaaacatcctgcatccatacagttaaaaacaattaaaaagccacgttgaagattctagattaaagccactcaagtggattcagcactggaagtatgaatcacagcaacaaaacacttcttcagtagtttagaattctgcatagtaaagagaattttttaaaacagaaatggctaacaacgtgatgggagaaattcaaaaccaacaaaatgttaatgatcgtgtgaatgagacaaaatggcctttaaaatctattttctgggagggcgtggtggctcatgcctgtaatcccctaaagcactttgggaggtcaagagaggaggacagtttgagcctaggagttcaagaccagcctggacaacatagcaagaccctgtcactataaaaaagaaaataaaaaaattaatcgggtgtggtggttcatgcctgtggtcctagctacttgggaggctgaggtgggaggatcacttgagtctgcggaggtcgaggctgcaatgagccgtgattgtgccagtgcagtccagcttggacaaatgagcaaggccctgtctctgaagaaaaactatatatatatgcttttcttctaggttcaacttagtaattttcaccagatattagtaagtgaaaaaaagggaatgaaagaaatgtatctaatatggccctgtttgagtaaagcaaacatttacccctaaatcctgtatgtgcatctgcatgtgtgtctgtgtgcatgtgcacgtgtttgcatatgatctgcatatgtgtctgtgtgtgcacgtgtgcacgtttgcatatgatctgcatacgtgtctgtatgcatgcatgcatgtgtgcttgcatatggtctgcatacctgtgtgcgcatgtgtgcacacgtttgcatataatctgcataggtgggtctgtatgcccatgtgtgcacgtttgcatatgatctgaatatgtctgtgtgtgcatgcgtgcacctgtgtttgcatatgtgcatacgcgtgtgcacacatttgcatatgatctgcatacgtgggtctgtgtgcgcgtgtgcacgtttgcatatgatctgcatacgtatgtctgtgtgtgcatgcatgcacctgtttgcatatgatctgcatacgtgtctgtgtgcatgtatgtgcgtgtttgcataagatctgcaggtctgtgcgcatgtgtgcacgtgcttgcatatgatctgcattgtgtcatgtgtgtagtttgcgtatgatctgcatatgcatctgtgtatgtccatgtgtgctcgtgtgtttgcacaggatctgcatacgtgtgtctgtgtgtgcgcatgtgcgcacgtgtgtttgcacgtctgtgtttgggtacaaatctgagttggcatgaagataagaatggacggaaccgggaggttaacacggggtggatgtaaattagatgaaaaaagactaccctcaaaacaagcgccaccaaagaagactaccctaaaaacaagcgccaccaaagctgcgcacgcacatgtgtgaagaaggtggaacccggcaccacggcccacaccctaaggggtcccggcatccacccagaggcttcctctcctccttcactgtgctggctgcatgcaggacccaagggaccctgcaggtcacagccaggatgtcagctgctccccgggtccccatttgccacctctcctctctgtgagtcctccccttctagccataggagtcctccctggacggcaccccgggcctatgctggggtccctgtggcccaagaagacagcctggcaagtagtgacagagaagccaccaggcgagaacaccactcctggagccaagaaacaccccgagaccccagtggagagcactggagggtccagaagggccactgcacccaggcggagactcaggcccagaggcctccagagatggagccgagtctgagggcagcctctccttctctcatggccaaccaagggccgctcatggtgaggaagtggcagaagctgctcaagagccctttctcaccttggaaatggcccgtggagatggctcacagctagcccatgtcacgtggcgggctctaaaagtcacccaagtgggcttccctgtccttcctatgaagaacacgaccagacactgagaccagagacacgcaggaccacagtcattcacgccccaggtgacagggaagggctctgcctcccggtttgagggaaccctctggaaccacgctctacaggatgcttctcccccagggaggggccgtgcaattaaatcaacacaggaatgcaagagaaaggacccagagaggagctggctcggcctaccggttgcagcccggcagctgagcgagctcacggcagaggccgtggaggctgcctctgattagggaataatttaattaaaagaaactgcatccctgaccctgggagctgggaaggggagggaagggccatcagctaaagcagggacaggagggcggggactggggctgcttggtggagcctggtgcagcccaggcggagctcacccggcgatcgcttcccgcaggcaggctctgctccagcactaatagggcttaataaaaacttccagttgggccagtgaacccctcattaagctgtttttaaagcacgaatttaagagccgcaagggtgaagggtcacagggagcatttaattcacaatggctggcgggaggtgctgccgcaatggaaaacaccctagcccagtgtctggggccccgcacacgcacggcgacacttggcctgtgcggggacagcctagaaagcagacctgagaggtggggaagtttcccgcttggcaagagcacagcagcaaaacccaggaggggcctggtacgcttggaaagcctccgaatgtagcgacaaataaccgaattccagcacaacctgcaacgaaacctgggccgcggccccacacaggcacccaacgctgggacagcctggccgtcctgcctccgtggctcacacaggagcgcccgttgctgctgagattcattcctcgcacccgctacgtggatgggcccccccagcctccacgtgttttcagcataaccacagtccaatcccagtgagacccaggccacctgtgtgttggcgctgacacctggcccagcatggaggaaggccccagaccagctggcattggccttccagaagatgaggataaaccaatcattcatcagtggaagataaggataaaccaaccattcatcaaccaagtttcttactccaaggaccccaaattccctcaggccctggcctgtccaactctcccctggatgggactgtagtaagaaacagaacccacttcctacaaaggaatatcctgggaaggtggagacttccagaacccttccctgggtcctgggaccctcactcctctgtatgcccccagctgacaccctcacttcactgccctgagggagcaggggggcaaaggcctccagcccctccccacaggcagtcaccatcaacagcccggttccctgcacgagcccatccccacgcccccacgagcccctccccacatccccacgggcccaccccacacccccacgggcccatccccacgcccccacgggcccatccctacacccccatgggggcccagtggtgcaagatgggggtaggatcgcctggaggtagacacccgtacacacccaagtccatcaggctaaaatcacaaagaaattacaaaacgattttgggggcctaaaacactccaaaggccttgggaacctgttggtcttcctctgggactctatctgggcacaaagacctggcaaagtggcccaggagctgagccagaggaagccctgccctggcgcctgtgcactctgccccctactcacacaaggctgcccctggttccagaacccctcaccacgagtgtctccttcccctggtcacatctcagcggccagtggggtcacaatgctgtcccatcccgcgcctgaaaagcccagccatccctcccagctgccccaggcctgggaggggccagaaagcgtctccagaagcactggggaccggccctggtctcagtcccagaacaacggctgtggcctttgctgtttcaacctcaccaaactctgcagacgggagccccttcccagagcccgctctccatacagaaccaggtgctaggcatggcgccccatgggggacggggaccacgctggaggacagggtccacactcaggggatggggccaaactgggggtcaggcccacacttgggggacggtgcattgtcgggagggtgccggcaaaggcggtctggtcctggagggaaagcaggcagccccacggagccctgccacccgctgctgcgggtcctctcgggttcccgcatcctttccaatgcgcaagggcggctggaagctcgagacactcccagatccaggctcactgaatatcaaaaggtgcactcgctgcagggcggcaggaagcggccacattcggggctgcggaattcattaccgtcaggctccttctttgaagtgaatgttaccaaactcagcagccctcaaagctcagctctatctaaactccagcagaaacacagacggcagaatggggtttaacaaatattgtggttttcctgcgtcctggaaagcgcggccctgacgaacgcagcttcatcctgctcagcagtcacgtccgtctgtgaacgggggcgcacggccctgggacacagagcccaggacagcagtggtcgtgtacgtgtgaacgggggcacagggccctgggacacagagcccaggacagcagcagtcgcctctgtctgaacgggggcgcaggaccctgggacacagagcccaggacagcagtggtcgcgtccgtgtgaacgggggcacagggccctgggacagagcccaggacagcagtggtcacgtccgtctgaacgggggcgcaggaccctgggacacagagcccaggacagcagtggtggcgtccgtctgaacgggggcgcaggaccctgggacacagagcccaggacagcagcggtcgtgttcgtctgaacaggggtgcagggccctgggacacagagcccaggacagcagcagtcgcgtccgtctgaacaggggcgcaggaccctgggacacagagcccaggacagcagcaggcgagctcgctggaggggctcttacaacagtagagagatgtgaacggagacccaaagaccagcctgggcagcacagtgggaccccatctccacaaaaagttaaaaattagctggccatgacagtgcgcctgtagtcccagctaatcgggaggctgaggcgggaggatcgcctgagcccgggaggtcaaggagctgagattgcaccactgcactccagcctgggtgacagagcaagactctgccttgaaaagaaaagaaacgtaaacattctgtggatggtgtggtcatcctgagaaaaaggaagacactagcgacgggggctgtgcggacttcccggccagcggccgtttcactaagagcagccgtgtgtattttcaggcgggtcccgctcacacccacagcattgtgagagcatgtcccggggagcccacgccgagccacgagccctcagaaggcagggtttgctgctggtgaaatgttaggatctttgactggcagcctctgcagactgctgggctgagaatggtctggggccgggcgcaatggctcatgcctgtaatcccagcactttgggaggctgaggtgggcgggttacctgaggtcaggagttggagaccaggctggccaacactgtgaaatcccatctctactaaaaatacaaaaattagccgggcgtggtggcgggcgcctgtaatcccagctactcgggaggctgaggcaggagaatcacttgaacccaggaggtggagcttgcagtgagccaagatcgcaccactgctctccagcctgggcgacagagcgagactccatctcaaaaaaaaaaaaggtctgggaccgcccagtggggaagccacagctacatgcggccacggagcacatgaggtgcagccaacgcaaccaaggactggagctttttatttcatttagttttaattaattttagaaacacatgtgcccagtggccgggctgggtgggggccctggaagcctggcccacctagagccggctggctgctgcctcggggcacgcactgcctgaggatgctgctttgcgggccgcagggtcccagtgaccgaccccgtgccccgccctgaaccacctgatctccactaaagcccattgtgcaaaatgaagacaaggaatgtcactgagatggacacagacgcacacgcggctcggatgagctgaggaacgcacgcacaaactgcattctcccaggccgtcccgaacgaggccacaggaaaggagcctccccagaggtctcagatcaggaagcctgaccttccagtgcctttggtctaggtgttctgaggcccagcacccggagtcatacctcagtaactggcagctctatgttctccaagatcagggaagggaagacagttcaaagacgcatggctgctcggaaggcagggagagcactgccgaagctactacgagtcttctgaatttctgcgcgacagtccaaagtgacgtgctgagccgctgcagggtcagacacaacatgaaactcaggctcacgagggctctcaggcggaaaacattaacattaatgagtcaacaattcgcttctgagtccctacaattaccacctgctaccgaagaatcagttagaatgtatgacgctcacctgaaaacacccagggagacacaaacgcagaagactgacttccctgggctgggagcgcaagcgcagcccccgacggcggccacacaggctcacgtcccaccccccatgcagaccccgttgcttttgcttcagcaagtggttggggacgcgggaggctggctccagagtcacccggctcctcgactgcctctgccgctccagcactgcctctgggagtccactgccccaggcacttcccccccaccctacttagagtagagcctgtgttccccaggaggcctcacaggcgggggcacggggagggtgggctccaggccctctcatcctcagcgatgggtcctgtggccctggtgctgagacacggcagcaccgtggcctcgcaggcccatctctcacagggaacacacaagcctcagccgctgccccccgagcctgccccggcctgcccgctcacagcccccgcggtgctgaccctctgacccgcgcactgggctcttgcctcacggactcgattttgcgatcactgctcagagtccacaacatcagacagcagggacttctcccgctagacacaggtgtcaggacctaaagctttccctcctcataagaactgggaaaaaataatactgttgtgattgtacaattttaattaaaaaaattttttttgtggtgatagggtcttgctatgttgcccaggctggtctggaattcctgggctcaagaggtcctgcttcagcccccaaactgctaagattataggcataagccactgcacccaccctgttgtaattttaaataaataaaatttactaagaaaagatttgtttatctaaatgttgaagaatgtagttttctctgtgggcattttgatactgaatgtatactggcgcactgcgggggaggcccagggactcaggtcaccacacacgcttcctcacgtctactcgctcccacacgcgtgagcactctaggggaggcctggggactcaggccgccgcacacgcttcctcacgtctactcgctcccacacgcgtgagcactctgctcccttgatgcagccacaggactggcaggcaaaaaaccagctggttccaaccaggttgtgtcagatttgcaaacagaaaaggaattcctgaaataattccttgcttcttgctttaagaaaaacatggaaacaatgaacagacgcaagcacgcagagccgcacgccctgacggtgcaccccgagccaggtggcacccagcagccaggaaacccatgagtgacagtggccaaggtggcctggtcgtctgcaattacaggaacctgcctttcaaggtgattaaaatcaggaataaggttcctttgtatttacgttttaacagattctgatgttcttcctttctttgattcgatccagatttccagcatcactggtactcaatattgaaggaatgaaaatacgtgaggaataaaagaatgaagaaagtgacctctaccgcaaggacacaggccctgaaggctgagactgtgaagggggcaggcaaagatccacgcccagacaggccacccctgctctcctgggaaaggggccgagagccagagagttcggggcagagagagcctgagtgcgaggcccaggccagggcctttaccagcaaagaccggcccctctgcctgcgccctgaggtcatggagaaaggcaggggtgggggtatggtcatccttcccaaggtcctggagtcaggtctgcttaccaagccaccgtgtgtcccatgacattctggaggcctccgggcccaatggaggtcacatccaccgtcctcccggccctgtcctgtccactgggtggctgccctcttcccaccctccagtattgactgcgttgtgtgggatggggaagacctccggtcccctccaccaaacaaagcacaagccaaagtgcccaccagcgtgagtgccgtgagcaccgtgaaccttctctatgccgaggggcacacagccttgagcgtccacgggggatgggcctgtgggtgctttccctctgccccagggaagcggtggtaatcacacctgtgagatgccgacaatcatgcgtgcgaccatccgtctctaggtgcccggggcctggaagcccaggagctcccacatccagggaggaggcacggatcagatcacaagcgcccatcactgccctccgtgcatactgggaaggctgatggcagaggctaaggaaggggagaggccaggaaaagtgcgtgaagatacataccaaacacacaacgctcaactctcgcagagctttctctaaatgcatctcacttaccgaaagagtacctgaaaaacaaaagaagaaacgagtattaacactttggcttgtttcaaccaaaaacccactgtttccccactgagtgaagcccaccctggcacccagcacggtgtggggtcagggaagccctgcgaggaggacctgcccgctgggcattaggggaacaggagcccctccccacggctcacacacaggcaggcccagaacaggcaaccaaaacatattccaagatacacctactaagtacccatagaaataaaaaaatatgtattttgcgaatgagtgaattaatacttatttttttgcagcatcaattaaatgccacggcaaatgtcatactctggaatctgaaaatttaaggacatcacatgacctcgagcgcagctcattagaaaagggatcttaaatgaaaggaattggtgggaaaggctgggcaaggcctgtgtctttactattgaatcccaaccaaaaggggtttcagtgatgctgtgacccgcttcttaccctcagacagcagaggcgtgggcaagcagcacgggtgtctagaggaggcagagccgcgggaaagcaacaccaatgcatcccacacctgcctcagcctctgacctctctaaccccaccccacctcacagcaagacctacccttgggctctagaagaaaccccctctgccacctatggtcccgcaagaggcgggcaggatgcaccaatgcccgcatgaggagccctgcctcaggtgctcagtgccacacctgacgtagaaggcacagcatgtggtttgtggacacgaaatgtacggaacaggccggtccacagacacaggaggtagattgccaggtttatcctggggttgatcagaatttttttttttttttgagacacggtctcattctatcacccaggttggagtgcagcggtgcataacctcactacaacctcaagctcctgggctgaagcagtcctcccgcctcagcctcctgagttgctgggaccacaggtgtacaccatgatgccccactaatttttgtattttctatagaggttttgccatgttgccctggctggtctcaaactcctagactcaggcgatcctcctgcctccacctccctaagtgctgggatgacaggtgtgaactgccccagccagaatgttttcaacgtggtgctgatggcttcagagtccatgaatatgtacgctgacttgtacactttatgtcagggttgtcggttgtccaatcttgtggcttccgtgggccacaatggaagaagaaaaattgtcttgggccacacataaaatatactaacactagtgacagctgatgagctaaaaaaaaaaaaactcataatgttttaagaaagtttatgaatttgtgttgggtctcattcaaagccatcctgagccgcgtgtggacaagcttgctttaaatgcagttttatggtatgtgaattctatctcactaaagacattaaggagcaacgttgcctaatgaaatccacaggaatgaaaagctacagggtgtgggacggccctcagggcccactgcccatcccagggctccctacatcgtccgacctttgaatatgtctgtgattttccaccttgacattacgataaaagcacagcaaaggccatgacaaacgacatctgagccgtgggggaggtgggcggggacagagtactggagggctcattcttcaaccgcatcaggtgtgtggctgccccagtggctctgatatctttttaaatcatcccttacccggtagaggtccacactatttataggtaaaagagtacgaagtctagatttgcttttcactccagaggaagaaggctgggagggagagagggcaccccgttggctgaggaaggaggctgggagggagagagggcaccccgtgggctgaggaaggtggctgggagacagagggggcaccgtgtgggctgaggaaggaggctgggagagagggggtaccccgtgggctgaggaaggaggctgggagggagagagggcaccccgtgggctgaggaaggaggctgggagggagagagggcaccccgtgggctgaggaaggtggctgggagagagagggggcaccgtgtgggctgaggaaggaggctaggagagagggggtaccccgtgggctgaggaagcaggctgggagggagagagggcaccccgtgggctgaggaaggaggctgggagggagggagggcaccccgtgggctgaggaaggtggctgggagagagaggaggcaccctgtgggctcaggaaggaggctgggagagagggggtaccccgtgggctgaggaagctggctgggagggagagagggcaccccgtgggctgaggaaggaggctgggagggagagagggcactctgtgggctgcaggatacactccctgcccccctttccgtgaccaaaatcttccaagcaaccgctgtacacattggctaatgctagaaataaatttacccccaaaatgttcccaatatataaccttagttgaacggagaaaggaaaaggagctgatttttcaaatccatagagaataaaagctttgctcttttattagccaggtgtggtggcgcacacctgtagtcccagtgaccttggggccgaggctggaagatggcttaagcccaggagttccaggctgcagtgagccaagatcgcgctactattgcactccagcctgggcgacagggcgggagatcctagctaaaaagacgcagcctcacgcttttatcagaagggaccaaggcctggaagagtttcagtgactcagggccaccaaaatacaagcgttgtgcagagaaggggtgagtccagacgcagctgccttcacatcggctgagggtgttcgaaaatgcattcttctgtcacttcacctgctttgaattttgcatttcaaggctgcctgataaaagaatctttaaatagcaggttttagctaaggtaatgacacgaaaaactaaaacgtcttattactttcatagcttttattacattttcaacagttggaactcacgttagaagataccgactccgtggagttcttctgggtttgttctgctgttttgttctttaaagaaactcaagtcctttcctggacagtgggacgtagattttgcttttggatggtcggggttaacacgctccctctgactgcctagtgaggtcaggaacctgctcccctgtgagcctccacacctgactgacaggccgctggggtctctgttgactgacaggctgctggggtctctgttgaccgacaggctgctggggtctctgttgactgacaggtcgttggggtctctgtgctagggaggcagcaagacccccgatgccctgcagatgctgcacacggccccagcacaggccctgccccttgcactggatgggggctcccatttctataggaagcttttgatttaaaaacacatttggctccagctacttatcatctgtaaaaagacttcatgtataaatatttgttaaattttatgctccccattttggggcaggctagttgtaaatttgtaagaaatcttccagtttctggcctagtgcaaagaactttgctggaggcctatctagagtgtgtagtagggacttaatcatgaaccatgtcctcctgaaccacgcccaggttcctgacttgtgtctgcagctgatcctgaaccacgcccaggttcctgacttgtgtctgcagctgatcccaccatcaagactgaagtctttgtcatgtggtgaaggccaaacgtggatttatttacagaagttaccaaaaaaaaaataccacaaaaaaagaggggcgcctttgggtgagagcagctggggggcttccatgtctacccgcctcgcaggagagggggtggagcacccaccagaccactgtgcctcccactcaatcacggaacggggtgccagctagcactggcaaggccgggacgctgggtcccgctgtgcagggccatggcctgcctggcacagggaagcgctagactgaacagtggcttgtggggacggcagggatggggctggacagtggcttgcagggacagggctggatggtggctcgcggggacagcagggacggggctggacggcggctcacagggaaggcagggatggggctggacggcggctcgcggggacagcagggatggggctggatggcagctcgtggggatggcaggggtggggctggaccacacataccagttcggcagtgccagtgaggcaactggttcactgaagacatgactgctgccaccctaatgtttaagttcatacaacagagaaaataaaatggtaataacaagaggtgtctttgcaaacatctgtcgcctgttgcctcttactggagctgccaagaggaagtccaggtcccagggctgttgggaggacccgggctgttgaagccaggcagcgcagggagcaccaagtgcatgtgtggctcccacggacagatggatggatggacagacgaagggatggatggacagtgctcccattactgtgtgaaaaccgacctcagagtacatagtccattcactacaggtaagcaatttaaaacaggatgtaaatatgtaaatagcccttaaaagtgtaaggaaaaagtgctggaggccgtttcgacaaagcacctaaggcagcaatgaaaatggggaaagacgggcagactggacacaagaggaaacctgtgcagaaagcaaagtccgtgcatacagaatgggatgcggccaaggggttacaccttccacgtgcatttaccttcccggacagcagggcctcttacagatggataaacaaagaacattcacaccaaaggggaacggcaaaggcaaaacacaaatccccagagaaacaacaagagcaaaaccaagaaaaataacttggcagagaaatgcgtatttaaataacattattttcacttaaaaactctcagtggtttttcggaaatgggatgttctgagtagggaacaggacaacagcacgctgtccccgccgtgagcacgaaccctgggtgcaggctggcggcacccgtccaccacgcacaccctgacccagcagcccacctcaggagctagttcacacagtaagtcacagccctgcaaaatatccctgcgccacaaagctggccaccgaggtgccacttccagcaataaaaaccaggaacaaccaacgtgccggccggtgggcttggcgcaatgagcaaacacacgtaacagaccaccctgtggccaccacacgtgccgccgagcagcggaggtccagacgggcgcgtggcatctggggcaatgaccagtgcgtcgctgagactgccggcgccaggcctcgaccctgctgtgtctgcggcgacccggcccactctccacgcggcctctgcctctgtcaggagcagtacatgctgaccaaagctgctgtaagacaacgtcggcgagatgggaagatacttgtgatttgacgggaagtaaaaaaactttggttatttccaatattgtcataaggaccaggtaatgaaaattgtttaagaattaagtgaccagacagggaataaaacagggtgcgcagtctgagcccacctttattagagagaagccctgggcagtgggctaaaaggaggcccccagaaagacctgtccacatcttaatgcctgcaccctgtcttatttggaaaaggggtctctgtggaggtaattaagttaaggatctcgaggtgagggcgtcctggactatgtgatcacagacgtcctcatcagagagacgtaccaggaaccctgagacagaccaaaggggaggaggcaaagcggcagggacccgagtgatacgtccacaagccgggggtgcccggagcctccaggggctggaagagacgaggaaggaccttcccgcagagactcggagggaagggaaggtccctcctcccatagagacttgggtggaactggccctgccgacaccctgatttcggacttctggcctcaagaactgtggaagagtaagtgtttcttgtttgaagcctccccacgtggtcacggtcatggctgcagaatgccgccatgcatctctcacagggccatgggaactggtttggacatatctccattccctgttgaccacctagaaacacaggctcacccaccggggaccagcatatcatggaggacaaggcaggtggtgtgggagggtcctccccgcaggcagcgtcctgcctgggacgacgaccacaggaaacagctgggaaaccccaaagaggaacaccatttatttaaaggaatgcataactttaaaatatcagtgtcataaaagatggatgtcccagaagagaccagacaactaaacccaacgccgaaccctattctggaaagtaaatgctataaggattatccttaggtcagatgacaaactggaaaatgagtgggagacgcagtctcagaaccgcaaccgtgttaaacctactgcagctgatccctgcaggaatgaaaagaacactcttcttaggaaaaacacccggaagtactgcagggtaaagggattcatcaattatgtcaaagtggccgatagtgccgttctgatcttctatgtcttcttttttttgtttgtttagttgttctttcaattattgaaagagtgattgatgttaaaatctccaaacagaattgtgaatttgtgtatttcttcctggagttctgcaatttttgcttcatatattgtgaggttcagtatgtggtgcctttatgtctttatgatcaattaagtcttttattaccacaaaatgtctctgtacacctctgataatactccgtgtcctgaactttactttgtctaaagttaatacagccactctagctttccagtatatttatgtagtctatccttctttatctttatccttcctctttcaactcatttgtacctttatatttaaagcatagctcttgaaaactgcatatacttgatacctgatttttttaaattgatttttttttttgcgacagagtctcactctgttgcccaggctggagtgcagtggctcactgcaacctctgcctcctgggttcaagtgactctccctgcctcagcctcctgagtggctgggactacaggcacgtgcaactatgcccgggtaatttttgtatttttagtaaagatgaggcttcaccatgttggccaggctggtcttgaactcctgatgacctcaggtgatctgcctgccttggcctcccaaagtgctggcattacaggtatgagtcaccatgcctggcctgattctaaatctctgtcttttaattggaagatttagtcacttacatttaatgtaatcattgatatggctcattggttattttttgttttcagagtctcacctggtttttcgtcctgttcctctgttcctgccttcttactggaagcaaacatgtttaacactccatttcaatcactccatgggctcctcagctacatatctttgcactacttttagtgattgccctagggctaacagcaggtatctcacctactcacaacagacctggggttaatattttctcgcttcacgtagaatttagagagccagtgatgttacagattcaggaaggatcccctccctcctttgtgctaatgttgtgtatattacagtattacagtttttgccttagttgtgtctgtattaaattaagaaaaaaagaaatagagaacatttcatatttccctacctttaccatgtccagtggattttactcctttctatagatgactttctgcctagcaataattctttctgccaagcaataattccttcagcctgaagatattcctttaacatttctatagtgtgtctgctggcaaagccttctctcagttttccgttatctgaaaatgtctttattttgcttttgtttttgaaggatattgtcactggatagaactctgggttgacaatcgtttttctttagaactctaaagatgccagtccatcatcctctggcctccagtggttataagaagccagacatatttgaatctttattctttgagtgtaacgtctttttccttccaggtgctatctttgtctttggtattcggtagtttgactacaatgtgcccagataacattttctcttacttttactgcttacagtgtgctgagcttcttggatttacacatttatatcattcagctattatttctttaaatactttttatgccccattttctgtgtcctctctctgtggggctccaatcacaagtatgttagaccacctggtgctatatgcctcattctctgtgtcctctctctgtggggctccaatcacacatatgttagcccaccgggtgctacgtgccccattctctgcgtcctctctctgtggggctccaatcacatgtatgttagaccacctggtgctatttgccccattctctgtgtcctctctctgtggggctccaatcacatgtatgttagaccacctagtgctatatgccccattctctgtgtcctctctctgtggggctccaatcacatgtatgttagaccacctggtgctatatgccccattctgtgtgtcctctctctgtggggctccaatcacaggtatgttagaccacctggtgctatcccacatgtcactgaagctctgctcgtttcaatcttttttctgtttgttctttagcttggataatttctacagatttctcttaaaattcattgaggctatcttctacccacctccaacctgttattaagcccaggcaacagatttttcagtacagatactgtacttttcagttctaaaatgtccaattgactcttctttaaagattcagagtctcggccgggcacggtggctcacgcctgtaatcccagcactttgggaggccgaggcgggtggatcacaaggtcaggagatcgagaccatcctggctaacacggtgaaaccctgtctctactaaaaatacaaaaaattagccaggtgtggtggtgggcgcctgtagtcccagctactcaggaggctgaggcaggagaatggagtgaacccaggaggtggagcttgcagtgagccgagatcgcgccactgcactccagcctgggcgacagagcgagactccatctcaaaaaaaaaaaaaaaaaaagattcagagtctctgctaaatttcccatgtgttcattcattaagaccactactaggctgggtgtggtagttcatgcctgtaatcccagcactttgggaggccgaggcgggcggatcacctgaggtcaggagtttgagaccagcctggccaacaatggtgaaacaccatttctattaaaaatacaaaaattagctgggtgtggtggtgcacacctataatcccagctacttgggaggctgaagcaggaaaattgtttgaacctgcgaggtggaggttgaagtgagccaagatctcaccactgcactccagcctgggggacagaatgagactctgtctcaaaaaaaaaaaaaaaaaaaaaaaagaggaatacttcccttgagtcctggtgtgtatctgtaatggctgcctcaaatcctcttttctacgtgtgctatcttggctatcatggtcagtttcttgtgacccttttttgtttcctgtatagggatcctattttcctgtttctttacttgtgtagtagtttctgattctagttgacattatgaaagatcataacatcattgagaagttaattttgtctgcttcctttggagagtgaatgagtctgtctggtaagcagctgagctactggaggatgaacttggtctttccaaaagctcagttagggtcagtctagaacagcccttttctagggcgagaggaaccctcctcctaagatgtggcctttctgggggcatgcgctgagtgcctagggtcttatgcaagtcacctctggaccggctgatggggaggcttgtctcccagccagcactgtgggaccctcagactcaccactaaggtcaccactccctacctgccactttccaccaaccctcaaagactctacccgccactttccaccaaccctcaaagactctcactctccacgttcacagcttagaacaaacccaaggacttagtggaatccatgtagctttctgtggtgatgtctgtgttagctcctttactctaatgccttgccgcacaaatgcaagctgccctcaactctgatccctgcctcctgagcttggagacgccttgtgttctgctgggtgccctagctgtggtgtacaaggtgctcaggcagaaggccggggccaccaaggccaccctgtatgtatctcctttccagggacagcagtcctgggcacctgtgccctctggtatttcacttgctgacggtttcatagtggggaggctcgtcctgcacctgccactctgccatggacgggcatggagtccatgaagacaaatctcttattttaaagtattgtttcaatgtgagacgtcctctccctcaaactgcccctgccaggcttgccctgtctacggcccctccttgctgcttgctgaagtctcgccctgtctacggccccagtgccctaaacaccccatctcgtctcaattgtcatccctgcccctttggtgcaccttgatgattatgggatgtactcttcggagtcaaagaaatacatatctcttgttaggttaaaaaaaatagggggctgggcaccgtggctcatgcctgtaatcccagcagtttgggaggccaaggcgggtggatcactggaggtcaggagttcgagaccagcctgaccatggtgaaaccccatctctactaaaagtataaaaattggccaggcgtggtggcagatgcctataatcccagctacttgggaggctaaggtgggagaatcgcttcaacccaggaagtggaggctgcaatggaccgagttcgcaccactgcactccagcctgggcgacaagagcgagactccatctcaaaaaaaaaaaaaaaaaggaaaatatttggctgggcacggtggctcatgcctgtaatcctagcactttgggaggctgagataggagtattgaactttgagcccaggagttcaagaccagcctgggcaacatagtgagacatccatctctacaaaaaataaaaatattagccaggtgtggtgctgggtgcctgtagtcccagctatttgggaagctgagcaggtaggattgcttgagcccaggaggttgaggctgcagtgggctgtgactgtgtgactgcattccagtctgggtgacagagcaagaggctgtctcaaaaaaaaaagaaaaaagttcagctggcactgggtcagagttaaaaaatttaaaaaagaaaaaatatctgtttaaaatgtgaaagagatttaggttaagaacggaaagggtcacaatctatttggataactagaaggcctcggcagaaagggtcgggaatctatttggagaagtagaaggcattggcagaaacggtcaggaatctatttggagaagtagaaggtcttggcagaaagggttgggaaacacatgttacgtggcttcaaggaatccactcacctctaggaaatgaagtaagtcacggttcatacaccacagctactgtggaagaaagctctggacgcaggagactgggttgccaagtccccgcaggaccagaaaagcctcagtacaaggtgcaaagacagactgttctccccccggcgtccagctgcctgaaatgtttctcttgttatgcagcaatgataggaaaccctctggaaacagctgacatggacaccccaaaacaagctaatggtggacacagagttcaccccaaaacaagctaatggtggacacagagttcaccaagaagtcaatgcagagtctcggagctggcttcagctgtggttatctgcaaatgacacatgggacatgggagttctttcgccttagaagtggacctgcaaccacaggccagccagggagggcaaggtgcggcgtctgccagccccatgtgccgcagcagccacgaaggggaggggacagctggctggcagcggatgtagccacttgtgtgctttccgaattcactgtattgttgcaaatcccagaaacctcagatcccaactctgccattacagctccaagcaggagtggaagccagaaggaagcgcttctcccagcaagtcctagagaggagggggacaagcctctgcagaaggcacccacggccacgctgtcctgtggcctcctatccagggcagggtgtccgctaaggcaactgatccaaggccagaagaggccttttacagtgtgaggcccggacagtcctggtcttcctgctgaggctatggcagacttttagagcagactggaaaggtgagtgctcacaggcccctctcgtgggagttcccgtctacaggtatgctgttcggaaggtgggcttaacagagaacgttcacaggtccaacctcaagccaaacaacatgggctcagtcacctacatggcccatgccctgccatggattcctctgcctctcaagggacctcacgtgccctggtgggcctgaccaagctgaagtcagggcaccccctcctcagtgtccacggtgccaagcaggggctcagcaagtatctgccagctgtgtaaatgacccgatgacagttgcaccagcagacacacacaggctcccatatgagagacgctcacccacctgccaggctctggagactaatccccgtctagccaggaaggtaactctgttgtttcagaggtcagctcacaggcaggactgagtgctaggcaggagtcagatatcacagacaaagacacccagcacacagcaacaggatcaggcttttcccacgccatttgaaaggaggacacgaccatgacccggctgacagaagagacgcccagggtgggctctctgagtgcctggccttgtgtggcaactgccacccctcccaccacggggtccctgaaccttgtgaaatgaaaaggacgtcacttttaccatcaaatatgtctacgccttgtcaaatcccttcccatgcattaacacagagacagaggctgcagcccagccagggagggccccacccacccagttggggctacgcagaggcaggtggtggaaaaggtgttgcaggtacttgtggaacctccttacattgaagtcctggagcccaaacatgctgttcatcgtcagtgagaaatgaagcaccgagggcggtgtccctgggtgctggcggcctcccagcgtcccctccagccctggcgctgctctcagtactctttgaagtggagccaccatccgtcctgcccaggaaggaagctccaagggcagctcccgccacaggaaggaggacccctgaggtgtcctgactttggtccaagtttctggagaggatctttccttccttctggggtcgagacagtggggaagggatggcggtgctgccgtgctgaagagcagcaaagcagcctgcagggccactgccaaagccaagcgcggatgacagtcagagccaacgagagagtcagagccaacgacagagtcagccaatgacagagtcagagacaacgacagagtcagccaatgacagagtcagccaacgacagagttagagacaatgacagagtcagccaacgacagagttagagacaatgacagagtcagccaacgacagagtcagccaacgacagagtcagccaatgacagagtcagagccaacgacagagtcagccaatgacagagtcagagccaacgacagagtcagccaacgacagagtcagagacaacgacagagtcagccaatgacagagtcagccaacgacagacttagagacaacgagagagtcagccaacgacagagtcagccaacgacagtcagccaacgacaaagtcagccaacgacagagtcagagccaacgacagagtcagccaacgacagagtcagagacaacgacagagtcagccaatgacagagtcagagacaatgacagagttacagaaaatgacagagtcagccaacgacagagtcagccaacgacagagtcagagccaacgacagagtcagccaacgacagagtcagagacaacgacagagtcagagccaatgacagagtcagagccaacgacagagtcagagccaacgtcagagtcagccaacgacagagtcaaagccaacgacagagtcagccaacgacagagtcagagacaacgacagagtcagagacaatgacagagtcagagccaatgacagagtcagccaacgacagagtcagagccaacgacagagtcagccaatgacagagtcagacacagcgacagagttagagacaacgacagagtcagccaacgacagaatcaaagacaatgacagagtcagccaacgacagaatcagagacaacgacagagtcagccaacgacagaatcagagacaatgacagagtcagccaacgacagaatcagagacaacgacagagtcagccaatgacagagtcagagacgacagagtcagagccaacgacagagtcagccaacgacagagtcagagccaacgacagagtcagccaacgacagagtcagccaacgacagagtcagagccaacgacagagtcagccaacgacagagtcagagccaatgacagagtcagccaacgacagagtcagccaacgacagagtcagccaacgacagagtcagagccaaggacagagtcagagccaacgacagagtcagtcaacgacagagtcagccaacgacagagtcagagccaacgacagagtcagtcaatgacagagtcagccaacgacagagtcagagccaacgacagagtcagccaacgacagagtcagagacaatgacagagccagccaatgacagagtcagccaacgacagagttagagacaatgacagagtcagccaacgacagagtcagccaacgacagagtcagccaatgacagtcagccaacgacagagtcagccaacaacagagtcagagccaacaacagagtcagccaacgacagagtcagagacaacgacagagtcagccaatgacagagtcagagacaacgacagagtcagccaacgacagagtcagccaacgacagagtcagagacaatgacagagtcagccaatgacagagtcagagacaacgacagagtcagccaacaacagtcagccaacgacagagtcaggccaacgacagagtcagccaatgacagagtcagagccaacgacagagtcagagacaacgacagagttagagacaatgacagagtcagccaacgacagagtcagagccaacgacagagtcagagacaatgacagagtcagagacaacgacagagtcagagacgacagagtcagagacgacagagtcagagccaatgacagagtcagccaatgacagagtcagagccaacgacagagtcagccaatgacagagtcagagacaacgacagagtcagagacaacgacagagtcagagacgacagagtcagagacgacagagtcagagccaatgacagagtcagccaatgacagagtcagagccaacgacagagtcagccaatgacagagtcagagacaacgacagagttagagacaacgacagagtcagccaaggacagcgtcagccaacgacagaatcagagacaacgacagagtcagccaacgacagagtcagagccaatgagagtcagagccaacgacagagtcagagacgacagagtcagagccaacgacagagtcagccaacgacagagtcagagccaacgacagagtcagccaacgacagagtcagagccaacgacagagtcagccaacgacagagtcagagacaacgacagagtcagagccaacgacagagtcagagacgaaagactcagagccaatgacagagtcagagccaatgacagagtcagccaacgacagagtcagagccaacgacagagtcagccaatgacagagtcagagacagcgacagagttagagacaatgacagagtcagccaacgacagagtcagccaacgacagagtcagagacaatgacaaagtcagccaatgacagagtcagagacaacgacagagtcagccaacaacagtcagccaacgacagagtcaggccaacgacagagtcagccaatgacagagtcagagccaacgacagagtcagagacaacgacagagttagagacaacgacagagtcagccaacgacagagtcagccaacgacagagtcagagccaacgacagagtcagagatgacagagtcagagacgacagagtcagagccaatgacagagtcagccaatgacagagtcagagccaacgacagagtcagccaatgacagagtcagagacaacgacagagttagagacaacgacagagtcagccaaggacagagtcagccaacgacagaatcagagacaatgacagagtcagccaacgacagagtcagagccaatgacagagtcagagccaacgacagagtcagagacgacagagtcagagccaacgacagagtcagagccaacgacagagtcagccaatgacagagtcagacgacagagtcagccaacgacagagtcagccaatgacagagtcagagccaacgacagagtcagccaaggacggagtcagagccaacgacagagtcagagccaacgacagagtcagccaatgacagagtcagccaatgacagagtcagagccaacgacagaatcagccaacaacagtcagccaatgacagagtcagccaatgacagagtcagccaacgacagagtcagagccaatgacagagtcagccaatgacagagtcagccgacagagtcagccaacgacagagtcagagccaatgacagagtcagccaatgacagagtcagccgacagagtcagccaacgacagagtcagagccaacgacagagtcagccaacaacagtcagccaacgacagagtcagccaatgacagagtcagctgacagagtcagccaacgacagagtcagccaacgacagagtcagagccaacgacagagtcagccaaggacagagtcagagccaatgacagagtcagagacaacgacaaagtcagagacaacgacagagtcagagccaacgatggagtcagagccaatgttctggaaaagctgaagcgacttcagatactatagcagatgctgtgctcagggctccagcgtcctgcaaggctgcgtggctttatgtaacaggaaggccagctctgagcagagtcagagtcctctctaaaatcacttagagttttatgcaacaattattaagctgtggctctctccgtcataaatgttgccaaacccccagatgtttaaatttctagaccaagaagacagacccccaaagtaccaaaacaaaaacgtgcaagtccacgctgcgacaaaccacgctcaggtgaacgataaatggggagcagagagaagcctcccacgcaggtgggctcatgactcctgcagacccccagaggcggcggaacctcacacctccagtgaagactgcagagcgacgtcctcaccaagagcatgtggtgaagggagaaaaagccacttcaccgtccagacactcaacaagcacagcccccaccaggccaccgtcagcagagacagctcatgtgaacgtgatgtgcgggggaggtgcgtcacagggcctggggcatcgggggcaaaccacaaacagccacaagcattgcacgtggccccaggcctgcagactcccgtgagagcgcctgaccccagcacaccacttcagcctgtgctgacagctcatgggcgcctcggcaaagtcaggcatgtgtgcgtggaggggtcctggggcggagccacgttgtgggtgcccaaggcatccccaggcctcctgccctgccctggtgacactgtctggcctgcttgttgaatgaggtgacacactcaagtgtagctgagacctgaggaaacaccagcaactggacctggcagcggtgcccaccccagcaacagccacacagtggggaccccccttacaagtgcccactccagcacagccacaaagtggggacccccccccacaggtgccctgatgccagctgcagccctccctgcatgagcctgcagggcctgggctgtgccaccaagcccagatcagagcaatctgagcctccgaccagggaacaccggagccacaggcgctgtgctggaggcagagcattcaggctcccggaagtgcacgtggccccagacactccaacctcaactcagccgccctgaccaggatggaaaacacaggctccacagcccaaggctgcgccctgcccgcaccaactcaccaccacagccttccatcctgggacagggtcctggttccgaccactcagccctgagccagctgcctcctgtctcccgtccacgaaagacacaagagccatcctcagtctccatgcaaagcccagctgtcccattgagggcggaaccaagctgggcatgcaagagccagcgcatccccagcttcctacacatccacacagacacccaccccaaaccagcctcctacatgtccacacagacacccaccccaaaccagcctcctacacgtccacacagacacccaccccaaaccagcctcctacacatccacacagacacccaccccaaaccagcctcctacacgtccacacagacacccaccccaaaccagcctcctgcacgtccacacagacaccccaaaccagcctcctacatatccacacagacaccccaaaccagcctcctacatatccacacagacaccccaaaccagcctcctacacgtccacacagacacccactccaaaccagcctcctacacgtccacacagacaccccaaaccagcctcctacatatccacacagacacccaccccaaaccagcctcctgcacgtccacacagacaccccaaaccagcctcctacatgtccacacagacacccaccccaaaccagcctcctacatgtccacacagacacccaccccaaaccagcctcctacacgtccacacagacaccccaaaccagcctcctacacgtccacacagacacccaccccaaaccagcttcctacacgttcacacagacacggaccccaaaccagcctcctacacgtccacacagacacccaccccaaaccagcctcctacacgttcacacagacacggaccccacaccagcctcctacacgtccacacagacacccaccccaaaccagcctcctgcacgtccacacagacaccccaaaccagcctcctacatatccacacagacaccccaaaccagcctcctacatatccacacagacaccccaaaccagcctcctacacgtccacacagacacccactccaaaccagcctcctacacgtccacacagacaccccaaaccagcctcctacatgtccacacagacacccaccccaaaccagcctcctacatgtccacacagacacccaccccaaaccagcctcctacatgtccacacagacacccaccccaaaccagcctcctacatgtccacacagacacccaccccaaaccagcctcctacatgtccacacagacacccaccccaaaccagcctcctacacgtccacacagacaccccaaaccagcctcctacacgtccacacagacacccaccccaaaccagcttcctacacgtccacacagacacccaccccaaaccagcctcctacatgtccacacagacaccccaaaccagcctcctacacgtccacacagacacccaccccaaaccagcctcctacacgtccacacagacacagacccactgcttctgcctccctttccccatccctctggctccagtaagctggcaacgcagtcctttaagtaaggaagagctactgcaaagaggtggggttttaatcctgaagatgggtggctgctgtggctggtgcactggccgctctgccatggcctaagtaaaatgacaataccctcctgaaggaatttaagataaacgctcgtccagtctttccaagtgccaggacacctgcagtgcctgtgctgagtgacagcaagccctaagctccgaccgccccattcctgctactcaccagacatggcccacattaaccagggacatgtagaggccccacagggcagccatgagaagcatgttggcgcagcccgtgatcagtacgaaagacgagatgcccagtccgagaagagccagcaagtccaggttggagttcatgtctgaccagtccatcagccagaggatggtgggcatgtagctgaagacttcccagctcgtcctgtcctggaagtactgctggaagttcttcaggaacactctgcagggaagcagccccctgtcaccgatgagctgcttgttctgatggaaagccaccaggaatgccacgactggaagaaaaagaagacaaaacaagcatgactaggaacaaaccacatgtggacaccatgggcgcagctcagaatgcggggcgaggcaggcgggaaggggaggcagagtctggctgacggtttggggccaaaccctagactcaggagtctgagtactttctcaagattttgggggaaacactggaaaagccaacctgcagcagacgcggtgtgtgcatacacgcatacacatctaagtgaactagacacgttacataaaatgcgtgcccgcagcagacgcggtgtgtgcatccacacacacacatatctaagtgaaccagacacgttacataaaatgcgtgcctgcagcagatgcggtgtgtgcatacacacacacacatctaagtaaactagacacgttacataaaatgcgtgcccgcagcagacgcggtgtgtgcacacacacacacacatctaagtaaactagacaagttacataaaatgcgtgcctgcagcagacgcagtgtgtgcatacacacacacacatctaagtaaactagacaagttacataaaaggcgtgcctgcagcagacgtggtgtgtgcatacacacacacacatctaagtaaactagacaagttacataaaaggcgtgcctgcagcagacgcggtgtgtgcatacacacacacacatctaagtgaacccgacccgttacataaaatgcgtgcccgcagcagacgcggtgtgtgcatacacgcacacacatgtaagtgaaccagacacgttacataaaatgcgtgcctgcagcagacgcggtgtgtgcatacacacacacacacatctaagtaaactagacacgttacataaaatgcgtgcccgcagcagacgcagtgtgtgcatacacgcacacacatctaagtgaaccagacacgttacataaaatgggtgcctgcagcagacgcagtgtgtgcatccacgcatacgcatagaagcaaactagatgcttgtatataaattccgtgtctgcagcagatgcagtgtgtatacacgcacacacatagaagtaaagtagacatgtgtatataaattgcgtgcctggctacacacagacagccagctgaccaaccggactgcactcagcattcaccattatgaaacacaccctgaggaccctggctctggtcaacggcatcactcccagcacacgctgcagggcttgacacttactgcctataggtgagccacacttgccctctacgcagaccacaggtctccgagttcacgtctcacggcgcccaccccacgacggctctctcacatccacaggtctccgagttcacgtctcacggcgcccaccccacgacggctctctcacatccacaggtctctgagttcacgtctcacggcgcccaccgcacgacggctctctcacatccacaggtctccgagttcatgtctcacggcgcccaccccacaatggcactgtcacatccacaggtctccgagttcatgtctcacggcgcccaccccacgacggctctctcacatccacaggtctccgagttcacgtcccacggcgcccaccccacgacggctctctcacatccacaggtctccgagttcatgtcccacggcgcccacccacaacagctctctcacatcctctggacgtcagtatttgtagaacactgaatgcttacccagagatgctgacaggtgagagaagcacattcccatgtgtaaacgtgaagaatgaaaaagcagttgaaagtaaaaaagatacaccattcaaatgtgaatcaaaagaaagctggatctaattcatcatggctgaaaaaaattaaaaataaaaataaaaaatacaaacaaaagaaagtggaagtggctctattaacatcataaaaagtagatttaagggctgggcagggtggctcacgcctgtaatcccagcactttgggaggccaaggcaggcggatcacctgagatcaggagtttgagaccagcctgggcaacatggaaaaaccctgtctctactaaaaatacaaaaattagctgggcgttgtggcaggcacctgtaatccaagctactcaggaggctgaggcaggagaatggcttgaacctgggaggtggagggtgcagtgagccaagattgcgccactgcactccagcctggacgacaagagcaaaactccatctcaaaaaaaaaaaaaaaaagtagatttaagggtcgggcacggtggctcacgcctgtaattccagcactttgggaggctgaggcgggtggatcacctgaggtcaggagtttgggaccagcctggccaatatggcaaaaccctgtctctacttaaaaaatacaaaaattagtcggatgtggtggtgcaccccggtagtcccacctacttgggaggctgaggcaggagaatcacttgaacccgggaggctgcagtgagccgagatggcaccattgcactccagcctgggcaacagagactccatctcaaaaggaaaaaaatcaatttacaaacaaggaatgacacagggatgaaagaagatattgcataatgataacaatatcacaagagcaaccccacaagtacatgcggcttcctactgcgtgtaggaatctggcttggggtccatgtctgtgtaactgtgcatgctggtttggagtgagtgtctgtgtagacatgtaggaagctagtacatgtacttttccccatgcatttataaatctaaaaacatataaacggaatctgcacatggaaaactacaaaacactgattaaaaaaatgaaacaagatctaactatatgaagagatagaccatgttcatggattggaaaaatcaaaatcattaaggtgtcaatttgatccataaattcggcacaatctgaaccaaacacccagtcagtgcttccgccgaggctgacaagctgattctagaatatacatgggagagcaaagggattaaaaagccaaaatcatctggaaaagaacagaggtggaggactcatgttacccaatttcaagacttactaaaaagctaatcaagaccacatcaagacagcgcagtattgattaaggaagagccgcagaactcaatggaatggaagagacggcccagacacagcccccctgcccccgacccgacacacagagtgaacaaattctgacaaaggttcaaaggcaactacacagacaaagagcagccttgggccgggcgtggtggctcacacctgtcatcccagcactttgggaggctgaggcaggaggatcgcttgagcccaggaattccagagcagcctgggcaacatagtgagactcagtctctacaaaataaataaaaaaacaaagaagagtctctgtaacaatcatgttggaacagatggatgtccacatgcaaaaagatggacctgaacacacttcacaccttacacaaaaattaaccaaaaaggatcatagacctaaatgtaaaacataaaagcataagacttccagatggaaatatagaagaaaatctatgtgacttgggtttggcaacaagtttttagatacaacaccaaaagcataatctatgaaattagaaactgtaaattgaactttatcaaactgaaaaacttttgatctgcaaaagctacttttaacagaatgaaaacacaagccgcagattggaagaaaatactggcaaatcacacatctgataaaggatttgtatctagaatatttaaagaacttttaaaattcaataattagaaaacaaacaacccaatgttaaaggtgggaagaaaaaaccaggccacaaggtctgaacagacataggaaggtgtacggatggcaaataacacgtgaaaagatgctcaacatccttcatcactgcggaaatgcccatgaaaaccacagcgtgctgtcaccacacacacgtcacatggccgaagtgcttgaaaacggacagtgcccaggccgggcgcggtggctcatgcctgtaatcccagcgctttgggaggccgaggtgggcagatcacctgaggtcaggagttcaagaccagcctggccaatgtggtgaaaccccgtctctactaaaaatacaaaaattagctgggcatagtggtgcacacctggaatcccagctactcgcaaggctgaggcaggagaattgcttgaacccaggaggcggaggttggagtgagccgacacagcgccactgcactccagcctcggcgacagagtaagactgtctcaaaaaaaaaaccaaaaaaacaaaacaaaaaaaacacgaacatggacagtgcccaatgctgcagaaggttcgggacagcaggagtgccctcgctgtgccggggatgctgtggcctaccactgtggatggcagacggtggcatctgacccagataatgaagggttaccttacaaatcagctactgcacctctcaggccttcaacctgaaagtgtgctcgcacagaagcctcatgcagatgctcatagcagctctgttcatagccactaaaaactagaaacaaggaagacatccttcacggtggaagtggataaataaccggaggtgcatttgtgcaacagaaaaataatcagagataagaatgcagctgttggttcaggcaataacatggatgaatcttaagtgcattttgctaagcaaaagaatctagacccaacaggctatatactgcgtgatttcattcgtatgtcacactggaaaaggcaaaaccagagggacgggagacagacccgggcgtgccaggggctggtgcaggggaagtggtcactcccatgcacgggggacttggggctggagctggggtgatggaggcaaagcccacagcactgagcattacacgagatgaacttcaatgtgcacaaactattgggggaagacccgaccaggaggttgggggatgcagatagaatacaggctccacacgcacggatgtgaaacagaaacacactggccagagggcaggagccgcctaagcaactccggaaaatgttctgagtggagaccgcaaggccagaaggagctgtacacaaacgctgcactccagggctttcccccccgggcctgggtggacaattctcgcacgtgcaccagggctgagcagatgctagaggagtcaggggagccaggttcccactagcagagagggaggattcagatgggccagcagggaagactggaatacaccgtgtgccaggacgggaggatggaatacaccatgttccaggacggaaggctggaatacaccgtgtgccaggtgagagtcagagtcatcggcatggaccaggttgaccttcgtatacttacagatggataggtggatacgacagagaagcaatcaaatgtgtgaaatgagatagtgacacacagagcctagctctacccaggaagagggccagcagctgtgacaccccgggagcaacggccctcccagtgcccagactgaagtttctatgctcccctaaaaagaaccagggctccttggaaacaactcattctagggctggggcagagaaacagaagctgggccggaagcatccctgcggggaaggaggggaaacccaccagtggtcaaagctggaggagctgagcagcaaactcacagtgacagcactggatcataacccagacaaagactcacagtgacaacactggatcacaacccagacacagactcacggtgacagcacgggatcacgacccagacacagactcacggtgacagcacgggatcacgacccagacacagactcacggtgacagcacgggatcacgacccagacacagactcacggtgacagcacgggatcacgacccagacacagactcacggtgacaacactggatcacaacccagacaccatctcatggtgacaacacgggatcacgacccagacacagactcacggtgacagcacgggatcacgacccagacacagactcacggtgacaacacgggatcacgacccagacagactcacggtgacagcacgggatcacgacccagacacagactcacggtgacagcacgggatcacgacccagacacagactcacggtgacagcacgggatcacgacccagacagactcacggtgacagcacgggatcacgacccagacacagactcacggtgacagcacgggatcacgacccagacacagactcacggtgacagcacgggatcacgacccagacacagactcacggtgacaacacgggatcacgacccagacagactcacggtgacagcacgggatcacgacccagacacagactcacggtgacagcacgggatcacgacccagacacagactcacggtgacagcacgggatcacgacccagacagactcacggtgacagcacgggatcacgacccagacacagactcacggtgacagcacgggatcacgacccagacacagactcacggtgacagcacgggatcacgacccagacagactcacggtgacagcacgggatcacgacccagacagactcacggtgacagcacgggatcacgacccagacacagactcacggtgacagcacgggatcacgacccagacacagactcacggtgacagcacgggatcacgacccagacacagactcacggtgacagcacgggatcacgacccagacagactcacggtgacagcacgggatcacgacccagacacagactcacggtgacagcacgggatcacgacccagacacagactcacggtgacagcacgggatcacgacccagacacagactcacggtgacagcacgggatcacgacccagacacagactcacggtgacagcacgggatcacgacccagacacagactcacggtgacagcacgggatcacgacccagacacagactcacggtgacagcacgggatcacgacccagacagactcacggtgacagcacgggatcacgacccagacacagactcacggtgacagcacgggatcacgacccagacacagactcacggtgacagcacgggatcacgacccagacacagactcacggtgacagcacgggatcacgacccagacacagactcacggtgacagcacgggatcacgacccagacacagactcacggtgacagcacgggatcacgacccagacacagactcacggtgacagcacgggatcacgacccagacagactcacggtgacagcacgggatcacgacccagacacagactcacggtgacagcacgggatcacgacccagacacagactcacggtgacagcacgggatcacgacccagacacagactcacggtgacagcacgggatcacgacccagacacagactcacggtgacagcacgggatcaccacccagacagactcacggtgacagcacgggatcacgacccagacacagactcacggtgacagcacgggatcacgacccagacacagactcacggtgacagcacgggatcacgacccagacacagactcacggtgacagcacgggatcacgacccagacacagactcacggtgacagcacgggatcacgacccagacacagactcacggtgacagcatgggatcacgacccagacacagactcacggtgacagcacgggatcacgacccagagggaaaataaatgggcgtgggtccatagtgacaaaatcagtgaccacaaacaagtaagtaacaagatcttcctcacagaggaattccacataatgtccgcagacactcccttcaggaggcgggggctggacccagtgagcggcttccagaggacagagcgggcgggaaagcagggacctgtcagagggcacacctggcaggcagaccttggccgggtgatcagaaagccgtgcggacgtcaggaccctgatacggtgtgacgggaagggccccgcacctctgtgggcgtcttcccaaaacccatcacccagtctaattgcgaggaaacaccagacggacccaacgtgagggacgctctacagacgccatgacaggcctgcttgacactgtcaaggtcggaatcctgcacaggaaagtctgggagactcacagaccagggagggagggaggagacgccaggacaaaaccgggtcccagaacggaacaggcacgggtggaaaagccatagagtctgcagtttcagttaatagttttatttttaataaaaaaattttaaaaagtaaaggtttctcgaagactctgcaccactcagtgcccggcatgaagcgctgtgagcagcctccctccaaggcagtgggagcagggccacaggcagagcaccgcagggccctgggcgacgaaagggtcagggctggtgacctctaaaggggctgcgacggcaggtgggtgggggcagctccaagtgaggaggaagagggtggacacaggcgggcacgggatggacacagggtaaacaaagggcagacacagggcgggacacagactggacacaaggctggacacagggtggacatgaggtgggacacagaggggactcggggtgggtcgcagggcgggaaacagggctgcagcagaaggctccccacacccctactgcctccaccactgggtggaagggacctgagctgtgagcgctgacctcctagcaacatagaggacacctcgcggtaggccctcagccccggcggccacacgtgcagggaccgcaccagcagcttccacagctcaggccagtgtgtgtgcatatgggtatgacatgcccatgtgtccctgtgtgtatgtgtctgtacacatgtgcacatgtatacatgtgcacctgtgcatggatgccctgtgtccatgtgtgcacgggtgtatgcatgtctctgtacacgtgtgcacatgtacacatgtatgtgtgcgtgtgcagggatgcatgtgtgtatgtcctggcatgtatgcaggtgggagaaacacaggttgtgactgttcagccactgcacactccagggcccagccttcattggtgctaggctggggcccctttcccacagggacctaattggcgctagctgaagggtggatgtgctccacccctcaccacaacgcaaactccaggaccacagaggaaaacaagatgtggcctcaccaaagcaatagcctaaatcagtaattctaaggcaagaagcataggatgcttcctgcttatcaggaaaaaggaagacagactgaattgagatttcagagagaaaaaaactatttcaacctctactcatgttataaaaatagctacataaaaagatgcagtaaaaatcttgaaacatcacaggctctcaaaacaaaactaaccaagcagtcaagcttcggaaggccccgtcactaccccacacgggaggcagcagagccatggcggccacccgcctctcacagggacccagagcctgacctgggagctgcaacgaggaaataccgaggaaataccgtgtcgcccgagcagccaacagcaggcatggccgataaatactttgtttcagaatcagaaagaaatagctgggcgtggcagcctgtgcccgtagccccagctactcgggaggctgaggcaggagaatctcttgaaatcggaaggcggaggttgtagtgagaggagattgcaccactgcactgcagcctgggcgaaaaagtgaaactctgtctcaaaaaaaaaaaaaaaaaaagaatcagaaaaaaaaaatcagctttctcttttctcctttcagataaattgttgtaagattaaaacagtcatcccagaaatgccgttctctgttgatggttcttactggccgtggttaaattctgggcctcagcacagtgacctcaagtattttttctttaagggatgtgctgcagagctccgaagtagggcagtgctgtttgctttttaaacaagcaagtattttatagaagaacttgtaaaaccaagtggtgcatttcattagaactcaagtggcccggagaaaagaaaaagaactcatttcccatgagctcttagagccactgaaagctcagaacaaaaccaactgagcagggtttcaagtattctttttggtttcattttctcctcaaattttctgaagaacagctgagagtttagcaaatacgggtgcaaacgattctgcctgccacgtcaaccctgcctcgggtgtcatctgacgaggatgccaagctacaagggctgcggtgagactcagagacacgctaccaatggcaccgcggccccacctcgccgaagcagctgccggggagacgcgataaaactgccccacgcggaaaagaaggaagggcggtgagcaggcgcacagaacagacgccacagtgcggcacgcatgcctccacgcctaaaggacaaaactagcatggagatcccctagaggtcggattttcaacataatctcagtgagcccaggactccaatgtgacaatgtggaactggaaagacgagcaagaaaagcccctccgttcccgccagcgttgggcattccttctgcagtccaggctgtccccgtcactcgggatcacagccaagcggtgggttctgtgtggtgcttggctcctagggcctcgcggaagccatgttcttctccattcagcttcatggagagactttcccaggtttcagcccacgctacgaagctagacaggagagtggcccccacccgccctgtttggaacccagctggggcatgcggtgtttggaacacatgggcagattggggagaggccagaagagcctcatccagagccaaggacaagccttgaggctgaagagctcaccaaggccactacaagagagcaaaaaaaagagcctcagagactcctcgataaataaccagaacagagagcaaaggtggagagcaggagggcaaggcactgagactttagaagcttccagggagaagaagagtcagatgcttgaagatgcctcctcaatgctgcaaagctctgagggaaagtggctttgatggagaattagagatccgggcaagttggtcctttctggaaaagctgcttggggatacactccagcaaaaagagaatccaccagcaaacaggaaggcatgagcagcccaggaagtatgaacacaaccaagggagggctgtggcagtatctgtcctgctgggccgcacctcggggctggaggtgggtagaggggaaagaaggggtaatggctggaaaagtgtcccatgctgacactaagccctggtagagaccacctgctacgggtcagcacatttcactgagcaggagatgcccctagaagacaagggatagaggtataaagaaagtcctctccctgactgcaaggagctagaggggagacaggcacaagaacaacactggaatggggacaatatcagccgcaaaggaagcagagagcagggctccggtggtcagccctgggtggggtcaggagtccacgagtgatgagggctaagtctgaaggccagaagggtgtcggcagccacggagagaacaagtacagttaaccctgggaaggcagaggccaggtggtctcaggaccacggtcaggaagagatgcctcacgtggcggggacacagcgggagcagttcaggcaccacggctcgtccactggggccccagcctctcactgcaagcagtgcaggtggacatctgccccagaggcagcagggagcgtgtgtcccaaagcccccagcactcatgccctgtgcaggcgccgagcagccggccctggccggggcggttccctcctaggcctgtccaggactcggcccccacaaacacatggaccgacagacgaaatccctcaggagtgtctctgcgccgacgccatggcacccacgaaaagtgccacacataaagtcagtctgcaaatgccaacgttacccagtcttcatgtcacatttcacctacagatcccttccgaattgtaacaatatctcataaatgtttgagcttcaaaggaaaggtcctttccgacgttcagatatatatactccgtggctgcctgcgagccgtctcccaggcgggtgtgtccttggtccgccttctgggaagtgtgcacaggcaaggaatcccatgtcagcctcaggacggcccagcggtcactctcacctcatcagtgacaggaaggtcttgatgagcaacttggccaaggccacacagctaaggtgtggcccaccaaccctgagccccactacttccacctgtcacagcttccagaaagttctctgcagtgaactgctatcaacccaattctgaccaactgtaattacactgtttccagataacaccttaattctgaggcagttaaaatgcattgtgtacatatactatgtgactctcatcaatagcaaaccaacgtcagttcagtccaggagaacccacccagggtgggcagctctagcctagggtgtcttcagtagcacctgcaaggctgtccttcccccgtcttgtcagggaatccagctctaccactggcgctgtaacagacacagggctgctggaaattccaggagtccagccccagctgcctgtggccgcccatggacggacctggccaggccccctgggagggggatttcaaagcatcaaggagccggcctggctgacgaggctccagaccagctgtttgccacacacgcccccgtactgcagggttgaccagtgagggcctcaatcttccgcagggaacgccgggccacaacgtcgacgcacgaccctgggggttcctgccataaaacagtgagggattctggccaggctgctctgccctctgttccggtgagcctgggcatggtgcccactcttgggttcggtttccttattgcgcacacagacagcagcaggcctgactgcaggaggcaccggcacccatgggcggccggcactgcccctacacaccaagaacatggcacccaggtcccgctgcttaggccggaaactcctgtcacataagcttttactcgtccagatttcagccattcctgggagtgacatctgtgctgaggggaagctcagtgtcagtgtcaggcatccccgaccacctcgggcagcctcggtcctcccaggagccgtcacggcccgagaacgccgctgcccagatgtgaaccgggtgtccaggatacgcaggctgcacagtggcgtgaatgaagggcagggctgaactccagggcctacggacaatcgctgcacagccgggccagtggctgaccctgcttcctcgctgtccactgggggtagtggcgttgtcaccaggaggtcagcaccgggcagggtgctacttcagcatctgctcaacgcagtaatcacactagggacccgagtccacacgtcaggaagacaggtgtgtcttcaactctgagccctgtgaaaatgccgctttccgctaacacactccggctcccacagcacagcagggcatgcccgacaccccaggacgcccgcggtatgcacgtctgtgtgcagtgagcacacccctagcacctacacacctcggtggcagcacatggaaacgcccaggcccgcggtgggaaggagccagccccaggacggatgcaaagtcaggttgaatgcagaggcctgtcgctggcagccggcctctccaggtctggcttcgaagcttccccgacagggcaggcgtttctgtgttctcctgatctgtacatctttactacatgtctgctgagacaatctgcctaagggtaagcctccctcagttcaatgtcttttaacaaggggagtttccacagaatacatttggttatgtgtttaattacaagtgtttcaatagctataaacattgtaaaattcagtatcaagtgaaatatttggagagcccctatggcaacttggaaaaaccctgggattctgaggaacagggagtagcgcacagtcccagtaaaatccagaactttctagaaggagataaatgcaggatgactgcctgcttgccctgggccagctcagccagaaaaccatgtccctgaaagatgggaaactggttccttgatacagcagaaaaacactgattctaccccaaatgtactcacaagacagaagaacgtgcatatgtcaaggagaaatgttcaatgctgggcaccaggcttaaaatatccgcttgacccagtggcttaaaagcagttccttctgaattgaacagagaatccctgcggagatcaaaggagcctcagctcgtttgaaagagtctgagctggttttatgaagctgtgctccggaggcaaggccgctgggacttcctgctgtatctcgggctcccctgtggaaggcctattagagcctcacagcttcactttatctctacttcatcgtttgctaagtgacagcaccaacatttaaaatgactgtttaatactgtggagggaaaagcaacctgggaagaactactttttaaaataattgcaggccgggcatagtggctcacgcttgtaatcccagcactttgggaggccctgaggtcagaagttcgagaccagcctggccaacatggtgaaaccctgtctctactaaaaatatttttaaaaattagtcaggcatggtggtgcgtgcctataatcccagctactcggaaggctgaggcaggagaatcgcttgaacccaggagacggaggttgcagtgggccgacatggtgccgttgcgctccagcctgggcaacagagtgagactccgtctcgaaaaaaataaataaataaaataaaatagttgctttaaagaaagagagagagagacacagacccagttgaagccgatactgcaatcccacaggaaaccttgtagtgatgagcgcgtctcatcactttgcaccaggaggtggaaagtatcacacaaatgtcacacaaaacgtcgaactgagcatcactccagcacaaccaggctaccaaacttcccgcgacgtgtgtggcacaaaggctgtgcaaagaagaacttctgcaacctgaccctttccttccacacgtgagggaagcagacgatggaaggaaagggagacgtccaatgcccacggcctacaaccaacgcgtgggcaacgcccggggccagcagctccggagccctctgggacggtgactgcccacgcgccccgctggctgcatctcggcctggcaggctcccctcacttccatactcatttgagagcctcacttgaggttcgtagctcctgacacgttgggcttatgaaacatgtatccgtgtgatcacatgtcaccgtgatcacagaaccgttctcttccaaaccagttctgggttgtagggactggggagagagggagttggaatcgccagctgcccctggccaggggatccagaggttttgagcgtgaactgacttttctcagagctctgctctgtaggctgcgcacgcgggccccgcacagctgtggggtgaagggtctccgccagtggacccggccaaccacatcccacagtgaggcgcaggcttcacttgcagatgaggttccggagctgcccccagacctccgctgggaatcttcccgaacgcagactgagctagtcgagaacactaaaggagaaactccagtctggccaccagccagtcaccttccctcagcccctgggagacgcgaaggaggctcccgggccggctcctcggattttggcaggggccgcacgcggcagggatgtggcgtgcgggcgtccagttacagtgggaaccttcaccgtcagcacagcgctgtgtcggggacagcaggagcgcctcgcctctccaggccgccccccgccccgcagccaggacgcagacccccgacctgcgcacggacgggtgaccctccacctgcccagctctcctgggaactcctgggccagggcccgggccggccccgcctcgcatagccccgagccggtcctggcaggcgcggccgtgcaacttcggggctgcgggtggaaccgggagcccaggagcccaggccggaggctcgaggcggcgacaggggtagggccgggtgcgctgtcgccagcaagccttgtcctgccctgcccgccccgccttgcccgggccccagcaggaaggagggctgcgtgggggcgccgcggccgcgagaccgcgcggaggagtctcgagggagggcgggggtcgtggtgcgcggaggtgacactggcggatgtcccgggcccgcccggcactcacagtacacgaaggctagggccttcaggagcacgatccgggtcagccagaaggtgcccgtgtggagatgggccggagagcctgcggggccacgccccggcgcgggcggcgactcaggctccggatccgagtacccagtcttccgcctcctcagcgactccgcgggcgccgccattgttgggctgtcagggcgcatgtgcggggagggcgcactcccggaggccccgcccattctcggaggccccgcccattctcggaggccccgcctctccctggccggccctgcccacggccgaaggccccacccacaccccgggaggccccgctcacagtcccggaggcaccgccccctccagccggccccgcccacgcgcgggagcgggtgcccggagcctgcctccttcgcagttctcgctgggcgctgctgcgggtagggcgcggggccgggtacctgggaggtggtgcgcgtcgcccgacccgagctcactggggcaggcacgcgtgccttccgtcagtccgagttgcagaggccaggtgccctcccccagccaggcgccttcccagctgtggtcctggggaaggtgggctgcacaggccctggcggtgctaccactgcgtgcccctgcctcacagctgacactcactctctgcggaggagggtgctagggcgatcgtcgcagccagcaagggacagagtaggcagggctgtgcctggaatgctcgggggaccctcccctttctcccagcctgagcacccttccgcctttgcacaacccagctcctgcctgcccttgggactggacttcaagctgtgggggaagagggggactcaggactcaggagggaagggctaactgcccaatgccccaaacagaacatgaaggaggacgccagcactctacactctgatgactggagcggggttctggaggctgatgtgaagcgggtgctaggaagggctggggtcacaggcattccttagaggaaagaaagggcgtgaggctagagtaggcattggagacctaggggttagtgaataaactgtggggcacttaggtggaagtgcagatttctccttattcatttgtcagcactctttacgtatgaaaaatcctgttcttttgtgtatattggaaatatttgtcctggttttttgtttttgttttcatgtattcttctcttttgcctctctagctttcctagtgttttggcgtatcaattatcgccactgggttggtcaaatgacccgtctttattgcttgtttaattacctgtttaattatatcttcaccacctgcagtgtgagccttgtgtgggcagggactgactgtggacatcgggcccccaaatccaggcctgaccagcagtggcccgagcttcctctcagcctccaccttccctgtgttgctggggccgtagcatacgtgtacatcttatggtttaattcatttttagtttccatttcttttctatgaaaccccccttaggagcccagctgtgaaatgggaccctgttaaagatgttgcaacgggtacgaacacacaaacatcctccgcatgctggcccagcctccgggagcgtggtgtgtgcctgagggctcggagccttggggatcgcaggaggcatcggccctggctggcgcccggcacccaagtccctccacagagcccacgacccgtacctctcctcgtgacctgggggccagcttaggaagggccggcacagcccacactgttcccctcatctgtggggaacagggagccccacaccctgggaccacgcctgcagagcgggccctgtctgggtgccaggcctgctaggggacggacggcgagagggactgccctgcgtcaggtgtggccctgcgctgtcctcaggtggggctgccctcacaaggaggctttgtgcacagcttcccctcgctgggccgagctgctctccccgcgaagggcacaatggggcattgtgcagagcagaaaagggcctcttgttccagcttccagcgctccgggctccggctctgcatttgcccagggtgggagcagtcagcggaagggtctgctgggagctcctgttctctctgagctcaagtttccctcagggtctgctctcttgagacgctgaccgcaggggtcccatccactgcccagaatggctccagagcaggtcaccgggggcagggcttgggccggggagaggtggaccagcagctctggtcgtgcccatttcagcctgaatttaatcaaaagtgcactgggttatgattcagccatcaaaaagaatccaggagccgggcgcctgtcatcccagcactttgggaggccgaggcaggtggatcacctgaggtcaggagttcaagaccagcctggccaacatggtgaaaccccgcctctactaaaaatacaaaaaaattagccaggtgtggtggcgggcacctgtaatcccagctactcgggagactgtgacaggagaatcgcttgaacccgggaggtggaggttgcagtgagcctagatcgcgccactgcactccagcctgggccacagagcgagactctgtctcactaaaataaaacataaaataaaaaggaatccagttctgacacgtgctacaacacagatgaacctcagaacatcaagctcagtgggacaggacagacgcggaggtcatgagttgcgtgagcccatttacatgaaatgtccggggtgggcaaagccacggggaaaggagggagctctgtggtccaggtctggggacggggagtggggagccagtggtccgggggtaggacgttttcttttgggctgatgagaatcttctggaactaggcgatggctgcccagcactgtgaggtgctaaacaccgagtcgttcactggcaaatggcttatttcatgctatgtgaatttcgcctcgaattttagaaaagtaaaatgaggccgggcaccggggctcacgcctgtaatcccagcactttgggaggccgaggcgggtggatcacgaggtcaggagatcgagaccatcctggctaacacggtgaaaccccgtctctactaaaaatacaacaacaacaacaaaattagccgggcatggtggcgggcgcctgtagtcccagctactcgggaggctgaggcaggagaatgacgtgaacgcgggggctggagcttgcagtgagccgagatcgtgccactgccctccagcctgggcgacagagcgagactctgtctcaaaaaaaaaaaaaaaaagtaaaatgaaaacaaaagacaacagacagccctgcactggtgtttcagaatcgcccggaaggcgctgtcacctgtcggaatacatcatgtcatttacgctcaccttacttctttgtctatattaaggcgcatctagcagtttaaaaataacatttagatacaggtgtgtcttattctctaagaaggcacttcacttaaaaacaggcttctctgcaaacccagagtgagctgcagcggccgggagatcggccaggtgtggtcctttcaccctgcagctcagtgtcctgtgaccacaggcacgtgggccctgccctgagcgcctcacaccaacccgaggcgggaggaggaggagggcgtcctgagagtgccctgtcaagcaaaaactctaagagaaaaagccaggctgacccaggagaggcctgagggaggggagtggagatgaggctcggccaccccagggctgcccggtgctgggggagaagacgctgagaagaggaggagaatggggaggaagggacggacaccccaagagcacgcaggctgaagactgggctgcctccccggagaccgaccagcctgccctaggtgggaccctgtccccgccgtcccggcctgcgccagcacagcccccaggacccaggcacacacaagcccgtggctggccacgctcccagcagctgcgggccggcttcagggaggaatgagcccctgtcggcacctcgtccagctgtcccccagcaccccggcctggcagctcccgcctcctcggggccattgtccctggcatgcggtggcagctgtctctggcacccgcaggaagccagtgtgggcccgaagataatcgtgcacccttcatttaccccaatttttcatgtcctgaagtctgggtatggaaggggggcccaggacccgtggatgctaacatctgttgcctcctcctggaagggtggtcagtttgggcagatcctgctgtgactgtccagcggccaacccccccaccccccacgtgaggctggcaggtgcgggtgggggctgagagagcaggtgttgtgccatttgctggttgtcctgggacgatgactcacagacggctgttctgcttggctcaccctgtcctctccctgcaccctcggctacaggtcacgagtgttcccacccctgcaccccagaaggagatgcggctccatgtgaccctgcaagctggcaagccatggtttctagacagtggaaagcacagctcccaatgtggtggtgttctccggttgcagggccctatgttaggaaacgaatgtgtaattttttttttttctctaggaatcatattctgcactggaagaagccttgagagttgcctggcccagaggtcacaaaccagagccctgcgggctgagctctacccacagtgcagttatcagtcaccgtgtagcggtcaccgacggccacattaatgctgcgtaacaaacagcctcagagcccaccgttgtgtgtcgccaggcggtgctgtccatgcccaggccccaagaaaggcaggggaaaggctgagctgggcctgtgccctctgtcccttcctatgagcctctagagcaaagctttgctgaaggctgttgtctgaaccaaggccacagaggaagcacgctccctgctcccactttgcccctcgtacccgcctgagggcatcttaattaagccttccttccccacgctcagaaaaataaatacttgggagacagcagagacattttcacagggtgtgttttcatttgcctttggcactaatgggtctctggaacgttccatcctggccggggaggtcagggcctgggcggccagggcccatttcgagaaagcaggttttcctttgtggcatgcttatttcaagcaccattttccctcctggttatacttgaaatggggctcggtgttgggaggtttcaaatgtggacattccgggcaaggggcctcatgaactctgtggacattctgggcaaggggcctcatgaactctgaaggttgagcttggaaggacggacacaggtcttggcagcctgagtgggtacaaacgctgatttttctggagtcagtcctctcctgctgatgggctgagagagccccccaggccctgtgtcccttctcagaggacctcagccccccagtgcctgggccacggatgggctgggggctggggcccagggcctcgcatcctacaagggcccaagggctgaaatggggctggggtccctggatctaggggatgagggcccagaacgaggctggggtctggggttcagtggagcaatgaccaggaatcaggctgcgatctgtagtccaggtgtctggcgtcagacagcaccctcctgtacacggcacagctgtactgcagggttagggacaggatttactgccaccaacggaagcgttgattccaagtctcagacaccgcccccaggctgggcctccctcgacggaaggtgacgctctctgggaggtccttggtgctcacctccctggctgcttggggccccagggctcctgcctagggatgttttggggctgcagaaggaccctctgcccattatcagacgagaagtgcagagagcaaatgcgtgctgttggcgccccccacccccacactgagagtggagacggataggcccagccagaagcttggggacccgctcccagcctggagtgacggacgctgagcagcaggagcacagctgttcccgacacatccgtgatctgggcgtgcacctgtcactggggagagagcagtgctggtctccacgctttgggcatcgcctgctccctgaatcctttccacatgcgaacagcctgggcaggggtccccagcggtcagtagctactcccgccagcgcgggttcatggatcaggaggctcccagtgtgtcaggggagtgcgaggtgaagatggggagggctgggctggaaatgctcgtcctccgtggaggtcgggggcatcaggaggaccaggaggacgtctgggctgcaggcagacgtaagctgcagcagggccagctctggctacagaggcccagaaagcactgctcctgcaaggtgccaagaaagactcactgagtggttttccactgccctgtgagcgccaggaagcttaaggcacagacaaggccagttctcaggcagacgccaccccagccaacaggccagccttgacccaaaccggaactcgtgccccagctggcactgccagcacccgagacagtgaagtacagggagctgcaacccagcccagagctccaagtgtgcgtggccaagaagctgactcccgaagggggtcttgagaggggtcctgcgaacccctcctctcccctggagacccgtccgggggcggggcctttcccagcctctgctcacagcctgcgccggcccagcctgtagtcactctgtctctgccagaccagccgtcattaaaagcaccaattaatctcccaggccgtgccaggacgctgccaactgccccacgggtgctcgggatgcaggggctgggaggcccgggccaaggctgtgcacacaccggctgccagcgggttcacgcccgccgggccctccctgtgcttctcagaggccgcacaaaagatgggctgcctgccgcaggaggagggccgggttgggggtggatggagggggacggggaggacgggcagggagggacggaggggcacagggaaggacggagagggagggacaggggcctctccagggtggcatttccctgggcagccctgcttcctcctcgtgccctgggcccaacacacaccacacacacacacacaccatacacatgcacaccacacatcacaaacacacccacaccctgcacacatacaccacacactaaacacacacaccacacacataccacacacatacatcatacacacgcacacacaccacacaccatacacacaccccaccacacacatacacgcacacacacacaccacacacacacatcatacacacgcacaccacacatcacacacacacaaacacacccacaccctgcacacatacaccacaccaaacacacacggacacacacacaccacacaccatacacacaccacaccacacacatacatcatacacacacacacacaccacacaccatacacgcaccccacacacatacatcacacacatcatacacatacacaccacacaccatacacaccatacgcactatacacgcaccatacacactatacacgcaccacacacaccataaacacaccccatacatacatcccatacacatatcacacattacataccatacaaacacacaccacacacacacatgaacacacgcgcctccggggtcgccatccctaggagccacgggtagggtggggtggtctctcatctggaagcatcccccaggccatccctgcaccatctcatgggcagcagagcctgtccacccacattcttctctgcggctgtccttggcgcccaggccagggcatgtggagctacaaatgtcatctacaccagctctccacgcccggcactcacggcccaggggacagccctggtccagattcccccatcagggtatacttgaaacgtacactccccctgaaactgcaaggcccactagcaggtggtgaggtcagggtgggtggggccatgcagacacggcggagcaggccccagctgaaggggtggggcagggatgggagacaggggaggagggtgtgtgtgcagctcccccctggatgaagacatgggcccatcaggtggactcagaggtggctctgatggctgcccctccactctccacccccgggtccatctcttgtcatcagacactctgctctagcttccccagggaacacgctggcctctccctgcaggagatcagaagcttcagggctcagcttaaatgacaccaaagatgctttcccagaccatccttcctgaagtccccgcctctgagaggtgcttttggagttacctgctgcctgcctccctccacaaggccagcgtctgcagggcaggagctgtgagggtggcccggctccatcctgtgtgggaaagtgcctggcacacagcaagtgcttaattaatacctggtgaccctcaagccatcccgacacctccctctctgaaagctccgtcccggcgtcctctcaggcctagtggctcacacccgcggaggacgaggtcattttcctggggacttcaaggtggaccagagatgactctggaaggggggtttgtgggcaccactctgcatggggatcctcacccacataccgccctcccgggagtgcaccaacacgtcctcagctgactggcctaggcccccaccaccccgccacagagactccccacctccccacccctcctgtggcagcctgcacgcccagcacctcccctggtgatcactgcaacctggggaaaggagcaggcgctgttggagcctgaggcagggtctcagttgcacagaccaccgtgccccagagtcagggcctggatgccactccccaacctcagtctcccttcctccaggggtgctggagttccccacctgtgtcccagggacttgaagcttccttggtggatggggagccaggaagaggccaccctgcctgctcgcagacctaatgcaactgcttttctttggcaaagagagctctccacggaggtcctcacccggatggcactgtgagcccgagtgggcgatgtctgctctcccaggggcagggggtggaaggtggcacagtttggaccggacccccaccctcactgcttccacttaaacccccacttctgcctgcctgcatcccaggcctaacagatgagttccgcgggcgccccaggcgatgctctgagggccacggaaggatgcggggaccccgagcggagggcagggcctccagggggaagaggcactgcagacggaggtgtgggtcttcccaggcaggtgccggagccaagcgagatggtgggacggggaagagagggcaggccaggctggcagccagctctccacctacgatgcgtggagcctcccaactcgcgcactccgtctccccaccgctgcttcctctgacctggctgcagagatgagaccgccctccgggcaggtgacacggcccttgctcttcagcctggaggccaatgcttcctccaaaggccctggccccctcagctccgggcctggctccggttgttcccaatgcaaagcagcaagggccccggggtctgcggacgggggcgggcggccgctgggggcaccagctctcggccgggccagaacagggggtaggaggcgcgtcctgtgcggtcggtggcggccccaggtgggtgcggtgcgctggcaggaagcggcagcacgacccccgactttgcatctggacttttctagtaacggaccagctccttctgccgaccgggccggggagaccgcgtggctcagtggctgcagcggccaccggcccgggcgtgggggctttgagggcaccggcgcggtaggtcacccgggtttcgcgggccgcaagctcggagacgcgcgtgtcccgcgttggctgcctgacccggaatggcgcagccccttcgcctccagcgcgctggttgaaaggatccgagccaccctcggggacggccgggccgaggccacctcgcggggcggccttgggcggggacccggacccgcggttggacgttcgcctcggggggggcaatgtcccctctccgaccccgcggtccccaccagggcggcacaccccgccctctccccgcctccgcaggcgcccagggctcacaggctcggagcggcctccgcctctgccggaccacccagggccgccccgccggaggggcctccccgcccccgagccctaggtcacgcccggaaggcccggggcccccgcgtccggccacgccatccgcccggcggccccagggactcagcgccggggtcagcgcaggccccgcccagcgctcccgccccctccagctggccggcccccgggaccgcgcccccgcccgcgctctccacgctcgcactcgtatgggcagggcggcccggggtcccccagctccgagccgcggccccttgaagcgcgttacctggacgtgcgctgtccgcagactctggacgagctgggcctgggcgctgcgcggcggaaccgaccctgtcctggaccgcaggcagcagctgaccccgcgccaccggcctgcgggcgagacctcaggcgcgagacgggctgtgtgtgtgtgtgtgtgtgtgagagagagagagagagagagagagagagagagagagagagagagtgtgtgtgtgtgtgtgtgtgtgtgtgtgtgtgtgtgtgtgtgtcgggggaggggcccgaggacccgcttcctagctgagcgtcaggacggggggcggactctcaggagccgcgcggcgcccgcagaggagaggaagcgccggagacccccctgctcccacccggcctccctgccccgcttcctttcccggggctccagagaggggagctccaggcgtggggcgcctggcccacgtggtgcggcgccgggcggggcaggcgggggcgcggcgagagccgcggagctttctttatgggtgggggggcgggggcggccgggctccgcctccgggggatcggggcgcgctccgccaatgggtagccgggcgcggggcggggccgcggggccgccgcttaaagaaacttgttgcgggtcccgcagcgggacccgagcctcggcggcggcggcggcggcggcaggggcgagggtcggggccaccgcgcggcgacctcgggtcccggagcgaccgcagggcagccccgggcgccggccccggtgcgcgtctcctgtgcgcgcccctccgcgcgcggccccgatgctggacatgagcgaggcccgctcccagccgccctgcagcccgtccggcaccgccagctccatgtcgcacgtggaggactcggactcggacgcgccgccgtctcccgccggctccgagggcctgggccgcgcgggggtcgcggtggggggcgcccggggcgacccggcggaggcggcggacgagcgcttcccggcctgcatccgcgacgccgtgtcgcaggtgctcaagggctacgactggagtctggtgcccatgccggtgcgcggcggcggcggcggcgcgctcaaagccaagccgcatgtgaagcggcccatgaacgcattcatggtgtgggcgcaggcggcgcgccgcaagctggccgaccagtacccgcacctgcacaacgccgagctcagcaagacgctgggcaagctgtggcggtgagtgccggcgccccgggggcggggttcgggaccttggccgcccctggtctcggactgcgagcgggggcctggagggcgcagagctcgcggaggtggtggccacacgcaggctccgggctctgcaccccgggcgggtgtcagggcgggtcccagtggaaaaacatcctctggccagccggggtccggcgccagctatgggagtcgggatccgcggagggcagcgcctggggtgtgcaccctcgtggcgggtgcgctctggagccagttctcctggcggggaacaccctgcggagggccatggctggcaccccgacgtgccctccagccgttgcgagtggccccagccccgggaggcacgcccggcacgacagcaagttgcatgcggctctctggaggtgctccctccttagaaagggctcagctcctctagctcctggaccacccatggggagggagtgcggcaggcggatg

SEQ ID NO: 330 - DNA, 89589 bp, Homo sapiens
  source 1..89589: mol_type = genomic DNA
gggcacccgacccgccaaaggaccccgatcttggcagccaacctaatttcttcagagccgctaccctggggccaccactccctcctagcgcccctcactgcaaaccctaggaggcccgggtcttgcccactgctcctgcccctgcccggggaccccttttccagccttagttgtcctctaaactctcggtcgcctgaacccaggcctgaccttccttgtcgtcccagtgtcccccattctcgatcccggggccccaacctcccatcggctcagtcccccgcccaatctctgccaggcccggagctttcccagacccctcacccacactccaggctcactccccgttcctgggcctgggccccccttgcacgagtccagggccagccgtcctcgccttctgcccgcccccgtccttcgttcctgggagccggccctctccgcggaccaagcggccccgagcaggcgccgccgcccgggggactccgactcagcccccgcgacctacctcggccgacagtcgggggttcccaagcggccactcccggccggcgccgtcccctggcggagccgccgcgctccctgccgtccgcgcagtctggcctcgctcggggccactcctcgtagcgctggagctttacaaaatattaataataaagaaggcagaggagaaaaaagaaagccttcgctccccaactcccaaatcaatttttcaagggggtggagcagagggatttgtttcgaagacgatcaaaacttctgcgaggggcccgcggggcggccgggccggggagccggggcctgagctcggggccaggcgcggcgcggggcgcgggccaggggcgcggagccccggggcgcgcgggggggcgggacggcactatttgacgtggagccggcggcgcatcccggcgcagggataccggccgcggggttcaaatgtcaggaagtttcgggaggtgaggcggcccgtatccctccgccgccagccccagctctaaacccggcggctcagcgggcgcaccatggcactggagtagcgcggggagcgcgcccggagccccgcggcccgctgcgccccgcccgggaccccgctgcgccgcgcgccccccccgcggcccgcggggccgcccctgcacccccaccccctcccccgcctgccgccgccgccaccgccaccgccgccgccgcctcctccccgcggctccgtctgcagcagccgccgccgccgggttccgggactgacaagcaggtgacagaggagccggcgcgcgtggctgcaagtgtccgggagagcgcggcgcgggctgcagccgccccggcccgcccgcacgacgccggggcccggggccagcgcgtcgccgctccacgatcgccgggggccggcgcaacccctgccctgcgggggccgcgcctccccggttccagggccgcggcggcggagagcgggtggacgggccggcgggcgagcagcccggccggcggggtccgcagcgcgccccgcgtcccatggatatagcaacaggtcccgagtcgctggagaggtgcttccctcgcgggcagacggactgcgccaagatgttggacggcatcaagatggaggagcacgccctgcgccccgggcccgccactctgggggtgctgctgggtgagtgcggggtcggaacgcccgagtggtctcgggcgtgggatggggcgtcgtccggctgtggacacgggcgttggggccaacggataaaggaaatgggtttgcaggacatggggaggaggcagagacaggactcctggagtgatcgccagagggccgcaagtacgcctccggcaggcgtcctgaggggacaggacagctccagtcgccacccaccatcctttccaggcttaggttctagagctgccactccgatgtggtaggtggcgggtggcaggggtgatggaggacctagcaatcaccttggcgagcttgggagaggcgcaaggtcacctggggtgggggagattctaagagaaaaacgtctccctggtcactcaaaccacagattttggggagatcggggatagaagaccacgaacgccaccgtggggcgtgtcagccagcgagcgccccagcctcacctcgcctgtcttggtcccagccggccaccctgcgccgtgctcgttgtcatttgtcttaacacggagcgcggattctccggagaaggggagagcacagcgccgagccaaggctcgaggcccgcggcctctccacgccggagcccgaggactgggacggactagccggggccgcccggcccctggcgcggcggtccggggagcgcaggcggcaggcggtgatcccgggcggcccgagccctcggggccgagggctgtgggcccggtgcgaccgggacgccggggctgggccgggcggcgctgacggccgggctttcgccctgtgcgctacaggctccgactgcccgcatcccgccgtctgcgagggctgccagcggcccatctccgaccgcttcctgatgcgagtcaacgagtcgtcctggcacgaggagtgtttgcagtgcgcggcgtgtcagcaagccctcaccaccagctgctacttccgggatcggaaactgtactgcaaacaagactaccaacagtaagcgcttctcgtcctccttccccgccaccgcccggcactcgagcccggtcagccccctgccgggcccggcccgcgcccgctctgccgccggctctgtgcgcggctgggccgggcagctccaagggttccgagagctgcgcgtcttggggctggggcggaccagcccagcccagcgggcactgatggggtcctgggagcctccggacggcccccagttgccatccgttgtcccggaatcctgcgctgggccggccgagggatttggtgcctgggtcctgggatatagggtctggcgctacggaggcctgaattgggaacccaaaattgatttccaaaggaaaataatgttttagggagccaggcctggcggactgcttcaagggcctggtgtgtgggggtttgggattcctggagcctggagccaggagccaggaggtggagtgctgggacactgaacggcctgagcggcaagggaggccccctttctgccaggctcactgctgcacttttagtccctgatggagagaaaagaatgtccatattccccaaaccgttccatgcgggaattttgcacttgcagttttctttggttggagaagcactctaggaagaggatctcaaaaggtggcaagttacaatttggggctcccaatgggagtgaggagctgactgagtcagcccttcccacaaggcctcctttctggtagtgtgtattgaggagggagatggcccgctctgccctggtataacccaaacctcagggctgaggccagagatgtgggttgagcccttcttgctaactagtttttagctgagactggatttgtatggccggggttggggacagacaacaggacatgcaggctttttcttttgacctcctgggttttctgcctggcactgcaattgggagggaggcagtgaggagccacaactgaaagaggggtgtggagatccccaaagctctgttgcagacacagcgggtgcctgcgaaaactttagtgatgccagaaaaccgtcctggatgaggctgcagagcgggtaggctgcttaggtggtttggtgctcagagagggctgtgtatgcccaagcctccagggaaggaaaagctgggctgccggcgcctcgtggtgagtgcaacctacctgttctgcccagggattgtccccagtccagggcctagtggaaagcagcgcagcccaactgtttaactgaggcctggaaacagtgcaggccagagccctagagagggcatcggattctaccccaaaaggctctggctgtgcctggtggtctgggggctgagcctgagctgctttttgcacctagctctttcttccggctgagggatctttgggtagggattggagtccattcagaggttcagctgttttgctggtcccagagtgcagctgaggccttcctctcagtaggaagcaccccagatttaggcacactgccgtaggtcggctttgtgctgtgctctgaactaatatgattctagttccgggagagggagacgccagtccgttcagtcacagcccaagcatagagcagcacaaattgaatggggaaaatagtttggggtagatgtggctgtgggctctgggctggctagaggagcccctctgtagggtgcaccagcctctagccccctccccaccacgccctgcacccctggcctcactctgcttgcctgatcccgagctctggcagtgccacttacacccagctcagccaccagcctttacgacaacacatgggggaagggggcccaggaaactaaaaccggcctccaaatcatttgcacagcttaaaaaaaagaaaaaaacttgttaatatattgaaaagacttatgaatcgcgtgtacatattctgccctccccccactccccataattatttacggagcttctctttaaaaaaaaaaaggaaaggataacccctggttcttcaggcacagaatggtaaagtcacgaaatttcagctggatgttgccttagagatgagcggctcaccccctcatcttacaaaacaattaaacgttaagcatttgctactgctttgtccaaagtatatttgttttaaaaagaaaaggaaagagtcacctaacagccagcttcttcagtgcagtccggtgtgttgagaatgatttttggcacagggcgaatctcaggtccgaagacctcactcagtctggatcctgtggggctgaagcctggggtggggagtgcattattctagctgtggacagttcattcctccaccctcattctattttttccaataacgccaattaggtatctgcgttaggccggccggcaggatgtgctgggggtggggggtggggggtggggtgattgttatcaggacaaatagccagtgagtcgtttcacagggagatggagcgccgctccaggcaggcagcagccactggaaagggatgttctttgcacaataaaaatttttttattcacatttctttttttctttgagaattgcagatgcatatttatttcatctgtgcgtaaatgcttttcagacaggaatccaagcaagcgggcgcagaaacgtgccttcttgatattgtcgagtctgtgcgtcagcggtattgagaaattaacaatccccccaccaaacacaacttctgaaaaatgtgtcctcacccctggctgagttgcagggctccgtccttaaaaagaggttgccatttttagtaaatgtctcttcttcctttcgatttgttctcaaagatcccagacacccagaagtgccaagttgtcttacgcaccacgggggtgattaattgacactggggcacattgagccgaatttgataaaaatcctcttgtacatccttggcgggcagagcagagcgccggccgtggagtttgggcattttcactcttaactccaaaagtctcctttttccccatgtgtgagttttgggggctccttcaaaaaaaagaaaaagcagccttttcggacagaaaaccagttaggaaacggagaggaaacgcagcctcccccaaatcagaacacctctcaccgtcctccaccggagaacaaatgaaaaataaggcactttcccccctcccatgtttttatcttggcggcttggccgaatagaattatgtaactctcttttcttgccgtctgtcgctcgtctggaaagggtttttatcctgaagaggtggagaattcctggaggaggctccggaaggggggagggtcggtgggagagtccaaaaatctgtcacaaaatggagtctaatcgcttgtaagacagctcccaggtttggcgacccgagacccgctggggtgcaagcgggcgcctttgtgcacggcgagacgcggggttccggcccgggccgcgctcctacctcggcggcggggccgcggcgtccttccgcccgcagggcctgcccgggcggccgagcctctcggcgacacagacttcagggctccgccgggcccgctgggggccctttgggctcgcctgtccaggtaggatgtgcctacgttggcagcaggggagcatcgaggctttgattgagtttcacagaaagccctcttgagtcctggggtgagtttttaaaaaatttcccccagctggctgtggctccagtggcccaaccgctctgccctgcgcattcctttccttggaagtgtttaccccgggaaagaccttcttgggaggctcacctctccccccacactccccatccagctcccgcgttcgggtgtggcccagggggagagcagtcaggctccggccttctctggctacttcttctgccagcctggaaggcctcccataggccctcctgcagggtgccagtctcaagcagcaccccttccccagtgtgtaccccaaccagcgagcccccctgccccaaccatcaaactcattcagggctgcagagcgcctgtcctggaaactgcttgggaggaggagccaggactttgccttacaaaaaggcttctatggtgctgtctctgggggctgaggcccaaagggctcaccctggcagcccaagtctggggaccctctggccctttggagggtacctctccatttaaccccggcaccttggctgtgtgcaagacggtaagcacaggccttcctgaggctgcagtcccctgctgctgaacggaggcattattcacagtgactcctggctcaccctcgactccccgggcgctgggctggtgtggccttatttgtttgccctatttttcttgagtgggggaagcaggctgggaggatctcctctggggtatgtgattggtgactgtcagctctttcctgccctgtccattggagccaggcttagagacccacggccgtggcacctacctgatcctcctctgtgaaatggggacttattctgctgggggcaagtattcttataaggacttgagataaggtgccccaaaggacctggcatcttgcctggcttgttattaatactctggaagttattgctgttactcttctcaccatgagcatggcagggaataccttgtctccaaggacacacaccacactgccaacaggttctctacccaggttccatggtacacagggtttaccatgagcctctccatgcagggaggatgaggagcaccctggggaagccattgcctttcccttcgtaggacactgtaaaagtcttgccttcctcagccatgaaaagagctttagactcggagtcagacctgagttcacctcccagccccaagtcttagcagctgtgtgatcttcgctaagtggttgcccatctctgagctggggcctcatcaacaaactgggggtgatgatgtgactttgcagggtggttgtgaggattacacaggcacctggtggaactttaataaatattccattctccgggggatccattatcctctcctgcacctcaagagaggtggaaaacctgattgtgtgggtgcgcacaggtgccaactgcattatcagaaagggccacaacagggtggccagctgtgctgggctctttctcctttgggggcagacgggtgtgctgtgctctttctccctgggggcagacggagggtggccgggtgtcctgtgctctttctccttgggggcagacggagggtggccgggtgtgctggctctttttcctttggtggcaaacagagggtggtccagagcaacagtatttccaccgggaaacaattggcatctccagggcctccatatagcttggaaaagcttaataattcatatttgaagaactgtttgtacttactgttttgtgattgaagccacagaaaataaagctcagccaatggagaagggggtaggtggaggagaggtctgggggatttgtctatttctcagaaggaagatgaggtttaaaaggtggagaaacaccattccaggaactcagaaggcccctccagctcgggctctgtggccttgtgaggtttccacccatgggtggctggcgatgcttctccaaggagccgcctttgtcctgaggctctggagtttctaaaaaataaagaaaaggaagaggaaaaaaaccagtcctactttggcatcagttaggctgaaggatggaggatactctcaccgacatgagttataacttccaatttgttggacaccacagtcaagcctcagccaggggagggaggaagggagggatagtctactcatccaaggagccgcgtgtgagctgtcagtcagttgggggtgcccgaggacccagggcccttggctgtctggctgacccagccggaagttcctctggccctctccaaccagattctgtgctgatggcagcaaagagcaaaaccaaaattatatatatttattaccactgcagtcagaagtggagagacggtggtagtgagagagggctaaggctgaaaaccatatttgaaaaagttgattcacgaaggtagaggaagcaaagtggcagacgtttgccatttcatcgaccggctggtgttctccattcatgtcataaatgtctcctgtcatttgatgccaaaagcaacatgatttggttccccggtggcctatagggtttttctctctctctctcttcttttttttttttttttttttttttttgcagtaaatgtttatttgttgataatagactttaaacagcctagccttgacctcaagtctcctgaagcatccatcttctctcagaaaaatgtttcaaagtttgtgtaattttggggggaaggtgtaactgacggggcagtgaagggcttgtgtttgctttaactactgctgcggtgaggagtggtggggcataaggggccactgtgctcggaatggcaactttcttgggtttcaggccggctgacagcacttcctctctgccctttacctttgctttgcctgatcagtacaaataaatttctgcgtgggcccttcctttgttattccctggataatattgtatccatttctgctcagcattttgactggcagccgctggacctgccctgctgaccttggggccccaaagggaggatgaggggctggggatctggggatgtgtgggtacatttgtggggaggctttgtctcaattgggagcttggctcggaccagccctggacgaatgtcctggctgatggcagagcacctggctggccttggcacttggtgaactggggggaagtgttgctgaaggaaaaacccggttcctggagcctggttccagaagaaacaaagatgtttgcttcctggccgggccagtgctgtgagagaggcttccccgggaactgtggggaggtggctagctggggaaggttgtgacggccacccagagcaacagcgatgcccactggggctggcaggaatgaggaggccaccgagctgctgggtagctgaagatgagctgagcatgctgagacacagggccgccaggggtccctcccccaagcgcctccccaggaacttcagcagcggtgacgggaggggaggagcagcactgggttgggatgggacaagttgggtgtgactgctgttcccccttctcccgcctcctgccttccaaggggactctgtgactcttgtcgtgtgattcctggattgctatagttactgggctgttgggtgtgggcgccagaccaggactgagctgcccaggcctttggggttccagaggatcaaggtgctctggggtgacctcctccaaatggaggggtcctgggtggggcacattttctcaaaggaagagcaagcttgttggcagttacagaatggggatccagaatgtctccatctcccagtgacaaaggccaagggcctttagggaaggactgacagctcttcctgagcctcagttcccttctctgtgaaaagggggtagtaattccaatcttacagggttgctctgagaataaagtggaacaaacccagatgccagccagtgttgggcatgcagtcaatgtatgttttcttccttcctgctgggaaatgagccgaaggcagccccgtctggcaggaatgcattgtctgtcctgcgtgggaggcccagaaagtgcagcctcctgaacaggcctcccagaggggtcttgcccacccttctgttcctcacccaggttgggagcctgtgtttttatttttattttttttcccttgaaaagggcatggggccggtctggatgccagaggctgctcctcggagccaaggccagcctgtggatgggccctcattactactgagacacgtaggtcccattttttccaagagactcctgagcatggtcagtgtagatgtgaacttgcaggagcagcgccttactgaacagggaggcagcctgcagtagtgcctctagaagggcaaggcattggcgtttgttgagcccctgtgaagttcactgtctgtaccgtcccaaccctgtggttaggggaggaaactgaggctgagcagcttgaacaacttccccaggcccagagttaactctgtagcagatttttcccggcccagagttaccctgtagcagatttcccccccaggcgggtccaactcccaaagccggatgggttctctaagtcctcctataccgaccttccggaaggtgcgggctctacattgttgctaatctcccccagaacgcccagcctgggaggggtggggagggggagtcgctacccgagggctgggagcagggtgtcactgacctcctctgcgcggattgccccctgtagggccagccctggccagcggaagaaaaaggttagaataattgccttcccctgggcgggagagcttccttcgacgtccggacacgcggatggggcggctttcagcggcctccacccgcgcacccctccaggcccacctctcggcggttcgtgcagcatgttctttactgggagtgggatgacaccatgcataggctcctgggctccgcagccgagccgcgggcaccagcggcggttgatgaatttcggtgtcaccaggggtttagcccggatttgggaaccgcgcgctctaatacgcgcacacggtcctgccctttctaaagcgcagccctttcacccagcagctgatttatggaggaattcgatcctgggacgcgctaggctgaagcccggagtccagggccctgcagcagctttcgggcttctcagcgtttcggggacccttggtggctcgggggctctcttgggctggggtcggggtgccccgccaggtggggccttacgcggtccagaaagagccagtgattctccttggagccactgcaggctcccgctggagggagtaagactggcggggagagctggcattttcattccttgttgagcacagccctcgcccctccccaagccctcctgccgaccccctcgggctggccaaaagcagcaagttcgggaggtttgtttattgagagaacagaaaattaggggttgcgggggagaatctaagacccttttcccgcctgagaaacgtgcgaagtccctcagctcctggaggcaaccaggcggcccgaaagccgagttcccggcgcggatgctagggccgaccccagccccctccctcctgcgccccagcccgagggcggcgagtggcaggtttttttttatcttgtttttttttttttggatttggtttgcaggggggaaatgtggttgtatcaatccacaaatatttactcttaacagacttgtatctgtggagatttcgaacaaagacagtttagggggattacaaaaaccctaaaccccgtttttctcccggacttggtgctttaaatgccaattataggcgagccatatccaacagcaacggggaaaggcgagcaggctccggggagggaggtggggggagagtccggccattaaatgtaacttttcattatgaaaaggatttcgccggttttatcttctaataagattatgtcacgaacacaagtacctaggatggtgctgagtgacagggctctgtcgtttaatcagaggctgtgccgctcaaaccgcggggccctttgtcccacggagtgaacgacggaaacttgccatcctaatccccttattcatgtcaagcacagaaaagaagccgagcaccttacaaccgtgtcccctccaccccttccgaggacggcgggaagagggggctccggccctgtagccccctgacgcttttcgtttccgagcgcgcttgggcctcaggagccggagcgttgccgtgggggcgggggaaggggtggttttgcgggtgccttaattggcagcgtctggaaaatggggacagtgaccccacgactagaggatgaatggggggagggttagtgggatgtgtttgcctcctctgaccgagagcacgggtcctgctctgtcccctcttcccaggaaaggtggcactccgggtgcacacccaccacccccattaaagcgggattgaccagaagagagaggccgaatggagatgccaggctggggccctcggcggggcagatttcgttggatccctgggactaatgtcgcagcgctcgcactcctgcaggtctccagggttggccattcccggctgcatgctcggcccctttcttccgagggtgaattcctttgttccacccccacggaaaccctcttctccgccaggcccgtggcgcctttctcgccacctccgccgccgccgccgccaccctcgtcccaccgtttgcagggctttcctgcggcgctctggccgcagagacccagccctgtctgccgactggcccttcgacgtcgccgccgtgcctgagccccgctgcctgctcggacaagcagaactccggcaggcgcagcgggcgccgaggcttgggctttagccgtggcgctcgcctcggcgcagtggggagccgcgggcgtcggagaagcggccgcgctgttccgggtcactgcaccggctgaaaaaaccaaaagcaaaaccaacacccagaaacgaagcctgcgtgcccccgggggctccgttttgctcccctcatggacatgggggtggggagctcgtggggtttcagcccaaaggctccagtcagtggaaccggagggggacttcggaggaatttgtctctgatgtcccggctccctggcctcctattagaactcgtagaggatccgctctggagtccccgtgcgccctggcagaggtcggggacgccagagtgcacgcagtctcctgcgcgccgagcccaggctccgggcgcagggaggatcgggctgagagcagggtgtcacctcgtaaaagcgacaggcaaggactgttttatggggagggagaaggagcaggaagtgatgcttccatctctgacagcatagggaccgggagctccgatggaggaaaccctttccgggcaggacgagtagagggacaggacatggccggggaccatgggattcgctgccattaagtatgggacgggcaggcgagagcggggaaggggaccgatggagccagaagccctgagctcacctcccgcccgtcctctcctggagccccctctgcaatcccggctcagtcggcaaccggcccttccttccaggtcaggggtgggggagagactttctccctcgaaacacttgataccaactttgtttttttggcaagaaaaataagccttgtttggaaaggggtgggtggggggcgtcgagcgagcgagggaaggagcaaggaggcggcggcggagcaaactctgcggattaggtttcagcgcctccgccccacccccagccccgcggcggtgatttgtgtgcgggggtctgtgaccctgcaagcatcaaacggcccgcgggaaccggccgagttcagagggacagtgggccgaagggcggcctaagacaacgcagatggttcctatcagcccggccgggcccgcagcgtccgccggtccgtccgggctcctctgcagggaagaggccttggtcttgggggaggcccccgcctgagcattgataagggtctggacgcaacagcccacgcccagtcggctccagtggaaaggaggcctcggagactggtgtcagagggttccttggccaggctgtcctgacctcactgggctcaggaggagcctgatgtgcctggtcaccagagtggcctctgagtagggaccagcaggaagagagaccccccggtctcctccccgtggccgggttaccctgtccctgccctgcaggcagctgaggctcatccacgatatagtgcccctcccccagggacccttcttcccttttttactcagagaggtgccctgccctgccctcagcctgcttgcttctgacttcattgattctatgcagtgatagaatgccctgcttcttcctgccagctggagcccttctgcttggcttgagctaactttgagggactcttccattttctccctcctgtccccaagggaaagcagagaaggaggctcactcatgccttggcccagagccttgccttggtgctgggagccctgcttggtcagggtgggaggggctcttcccccaccagccctggcctctgagcctgctccccttctttccccagagctggagcagggctgtcaacctcagcagtcccaggcctccctggcctgatttccagggcctggccttctgcgtggcctccagtgaccacagttgagtgcagcagggccacactcacagggaccttgggctgctttaggatatcccagctaaagggctcttcaggatcccagtagaaatgggaaaaccaaggtccaagtgcagctaggacttgtcctgttgtagcagagcagaggcggaaatcccaagctgcacgctaccaggcttgggggctgtgtggcaactccacagtccttttgagaaccctctcccagactctggctttaacactggcctactctgtcttccctgggcccaggtctcagggatgggaaggttcttcaatcccagctctttaagaaggggtgacaggtggacctggacaatgaaatgattttgagagttttctggataacacggggccacgtggcttgggaatgcggtctactaaactgggaccttgggggacaaaagccaggtgaggacagtgccacatcccaccatctttcttgtctctgactcccgcataccctgggcttggcccttcctgtctatagtgggtcatggggaggccagaggcctggctggggactcagagggccagtgggctgctaggacctctcaagactccatctcccagggtccctgcctcaggggagcagccggctgggtcatctgtgcacagaagacacatctgtcctccacatgttgcaggccgagcagaggacatgtggtttgggtcgtgttatcttaatcatatttattagccaatcctgggggaaaaaagagtttgatattgttatgattcggaaaaggtccccaaatctacaaggcgacagatcaggagaggccgccagcaacagccaggtctcagctgggttcaggacatggctttggaagttctttgggttgtcttagagcgatggaatctctacgctgcgaaacaacacttaaccgctttcattttcccagagatctgaagcgaaattaattaccccgccttgactgatagttgttctgttggagtatggttctaatccttattaacattctctaaagtcaggcatgaaatatgacttttataccacactctttggcatatgtttttcttttccaggagatttttcaggctatctctaagcctcactgctgttcattatttttgccataggtctaaagttgccatccccaaagctagtcccgcacagagcacagccaagcggggaggggggtgtgggaggaatgacacatctctgcttgcgacgcaaattgcttctgattattgagctttgaatatttttctccatcgtgtttttattaaaaactccagcatatttacgcttgatggtgtcttcaattagattaaaaaaaaaaaaagcaggggttcccctttctatagcagtatgtaaggaaaatagttatgaccacaaaattaccatccaaacctggttctagtaaagccagtcctgctttgacaagcccagcaggctgggtgctttttttctaagcgttccagctgctagggaaacagaccagagaggaagcccacagaagcctccattctgcacggtacttggggcacctctcaggacctaacacttcccaagtttgtgagccgcagaaggaagcccagctgcttggggctttctgacgggccgggcagacctggagcatgcacgacagcagcagcaataataacgccagctgatgcttgtttagcacttgtggtccatcaggcactgctctcagcactttccattctttaatgacactacgacatggcttccattattatttgcattttcaggtaagacaaccgaggcacagagaagttaagtaacttgcccaaggtcacacagctagtaaatggaacccaggcattgtgtcacgagaaaactttcagcagccttttgggagggtggagtctggcctctggctggggttggtgccccgatggtgggctggtactgcaacccaatgttgtttgttgaagaaatggctcctaatgaatggccagtgttcattttatgctgcttgtggtaaagctttgatggggattcactcactgaatcttcttactgctctgggggcaggttttattaatattatttcccattttgccaacatcaaagcttgacttgggtgcagtgatttccccaaggtggcaagctgatgattgccagcttcagatggcaccctagatcttgatgagacttcctaaaagcactgtggttggccgggtgtggtggctcatgcctgtaatcccagcactttgggagaccaaggcgggtggatcatgaggtcaggagatcgagaccatcctggttaacacggtgaaaccccgtctccactaaaaatacaaaaaaattagctgggcgtcatggcaggcacctgtgacctactcgggagtagctcccagctactcgggaggctgaggcaggagaatggcgtgaacccgggagacggagcttgcagtgagccgagattgcgccactgcactccagcctgggcgacagagcaagactccgtctcaaaaaaaaaaaaaaaaaaagcactattgtttgcctgggtttccaggtgacagaattggggctcagaggggtgaagccacacacctagggccacacagccagtggggggctatgcagcacagagtcagcatctgcgggtgccacaacctgcccttggaaccacttctcagctcccgggaacccaggcttgggggagcacctgcactgagccttctcagtgggtctgacttggcctgaacaactctcctggcagtaggcagggcacatttcatcactgggggggagggttgttatctgtgacctgtctggtgccaaacaggcatggcgtcatcccttccaaaccccattttacaggggaggaaattaaagcacagagaacctaagtgtcttgccctaggtcacacagctagttagcagctgatgggaatcacactcaggtggcctgtctttggggcggtgcctctcagagagaggctctgaatcatcatcttcgtcctcagtgttgtcagctttatgcatgaccacccctgagtgccttctgagtactttgcaaatatatagtgaaagcagcgagattcagagagggaaggtgattttccaaggattacaccacagggtggggccggccagggtctgccctcctgcccaggatagtggaagtccatgccatggatgggagcgtggccagccctcacagggccacctttacccctgcagtgccttcctggctccgggctgccggtgcagcaattcagggcaggcgttgtctggcctttgaagggacggctgtctgagtgtgtcactttgaactgcaaaggggcctgtggtgagggctcggccccctcccacgtgcccccgcctgcccacccctccagctctggttctagtcggcaggcctggagccaaaggggcgggcagggcagtggcccccctgtgggatgtcagcctgataagtgagcagcgacagacccctggaggaggatggagctggccgcccactggttgggctgtcccacgtggcaagagttcaggccagtccccgaggtgccatcctcccacagacatgcccttacggctgcagagaaacatctgcctgaacgtcaaaagatttaaattaaaataacagtaatgatagtaataataatgatttgtaaaaggaaacatcttgccttggggcacagggagcatcagggactcaaccctgtgttctgcttggggagtgctcgtggcaggaggtcaggaagaagaggtattaggtaagagacctaatgcctattaggtctgggctgctgattcccaggagtccagctgggggccttttgagttgctcagcttcctggctcagctcggccggccgggatggggcaggcctatcctgcccacagagagctcccaggctaagtgggtgggtggggtgaggtggggataggggcgagggcagagctgagcagaaatgaggccagcacagtccctgtgcctgcagttattggctcttggattttgtgaccccagaactgattccttgagaggccgagaacttaaccagatttttcaccagtgctttggaacctcaggttttaccacttcccgctgtgtgaccttaggttagaggctttaaattccctgtgcctcagtttcttcaaagtttactaaggaccagacccctgcctccgggtaaggatgattcagagggagcagatgccattcctctttaggtgagtggttcctgccgattttgttactgatgctcccacagtcctttgtgctgggcctcaaagggggccacctttgaccatatgtattgggtcttagctagaaaagggaacggtaggtgcgcagttcgtactgaaagaaagtataagggtctagagctgggctggactctgggcttggcctctttctagctgtgtgacctttgacaaattccttagcttctcagagcctccactctctcgcaagcaaaatgcacgtaaagaacctaccttccaggttgtggggagagcgagatgagatgctgtgttcaaagagccataccagtccatgggagccgtttttcttagagggaagagttgtgggcaggggcctcgttagtcacacaagaaggcagcaagagtgtgtgccagcttacgccaggcaggtgcccgtgagatgggaggctgcagcttgggaggatttggggagggcattccaggagggggccctggcagcaggaatattgggggttaaatgggtgggctgggacagtgagtctggcggaggggctgccgaggggctgctgggactggaggctgcagagcagggcaggagcctgtggctgtgctcgggcgtttggattttatcctgtgggcaggagggagctattgaaggttattggacaggggagtgacaggaactggagaggcactttatggagctgatgctggcaacatgtgcctgggattagaccggcgggaggaggctattgccaccttggaggtgagggtagttgcgggaaccagagagggaacagggcacagggagggtcacagaggcctggggcttggagctggggtggctggaaccccaggtactcagctgcctggctaaggccttgaggtcctgagcactctgggctggtcccagcaggggtgacccacttagctgggtccctggaagagccggcttgacctgtgcagccccactgggccccacacccagaagggcccttagcttggtttaatgctcctgctgtcacactcttgagattcttaacttttgaacaagtggctctgcccctgccttttcattctgtgctgagccccgcaggcgagcccccagctcacctgccattcccacatgtcccagacacttgcccacatcaaggtcttactcaggctgtggtggttgcccaggaggcgtcccctggcctccatcatcctttcttcttctggaaaactctccctactcccaaggcctggcacaagagtcaccggtttcatggagtctctctggctctgagccccacccccgtcctccaggcttggatctgtcctgtagcacttgctagaggtgcagaatcctagatctgtgagggaactcgaactctcgaggtgaagcccatgagtctacatttccagatggcccctgggggaagccttgcctgctgaggtatgacaacctctgcccagggtacctccaagcctggcacagggcctggtacttggtaggtgcatccgtgtgtcatgtcattgtgaaggaatgaatgaacggtgcttacctgtccatctggatggatgaagctccctgggcctagctcattgcctggcatgggtgggtgggttgcagcaagtctccacaggacaactgggaggacacctggccaatcctggggactggctggggcagggttcttcttcttcctgaaacctcgggacatgggggccaggctgggggatggaagggcaaaattagtaccctccgggagatgggaagtgggcagaggccacggagtccaccagcacatcctccctgtagctgtcccctcctccgaaaggactacccactcctgacatggttatacagcacgcacataattatacagcatgatggaagaagagaatttgattgttatttccagagcctttaccctgtgcagccactgatttaaggatcacattatttcattcaaccgtaagcctcatagtctgtgaggcagagcctgttattatccccatttcagcgatatggagactgaggcacagaaaggggtagtcggcagtccaaattcacacagctttgtgtgacccctctgccagttggcctccgagatgcctcattccccctgtgcctcccgcttttgatgcctcggggatacacctggcacagtatgtactcagcgaatgtttggggaaggcaggagggagggaagaaggaagcccagctcactcatccaaccggaaggacccctgctccaggcaggactggaataacgccaggactccaaatgagcaagatagtcccagcctggcctgcctgggataaggagcgggcagggaaacccagaggagaagcactgactttggcaggatggggcatgtgagggcacctggaaggcactgtggtgaagcccgggactggaaagccttcttgcccagcagtgacggggtcgccatggagaggcctcaccgggcaggtctctgaagccagcgtcagtttcatacaggcattccagaaatacatgtggaacttcctccctccacgccctgtgtgggtatcagggaggcatggggaagaaaacgctccaggtcctgccctcggctgccaccatggtgctgaacagggtgagtctagccaaggagatgccaggagcagacccggtgcacagtaggtgttcagggactgtccccatggagattttcagttacccacctcctgcattagcctctggtgccaggttctgcacaccccccccacaatgccacatccatgagccactgtcttgagtcctttgacctctctgagcctgaagttagtcatctataaaatgggtacagctattcctactgtccaggttgttgtagggattaattttgtagcgattaatccaggggagggccccgctgcgagtgtacctggaagaaggggtgctgcctggagaggtgggagagcttttaccaggcaggtgacatttggagtcacgaaaggggaggaggagggctttgcaggtgtggggtacagtgtgggccaaagcccagagacatggaagcctgtggcctgttagaagcacagggctccccgctccttcccctctcctctctgcccctggctgtcctctcaccctcaagccggtgccagtgtggctctgcagatttgcttctaagccctagcacccgctgcatgccagccaggcacaagcgccatatgaagcctgctgatggcctgggagacaggtgttactgtcattcccatttcacagatgaggggactgacacccaaaacccagaggccacttacccagggccacacggctggggagcttcaccaccaggtctgactccagctcctgctcacccttcccccagccctcccactcctcttctagtcagctacttgcccccactcgctcattgcccacacagggagcaggcccggggcttacacaaaggcaagggaggtagacggctaggacttggaagactgagaacagctacatagaggaggcgggcacgagaagcttctgcaaaaccagttgcagtcggaggagatgctatggcgagggcactccaggctgagggcactgcctgggcaaaggcatggaggctgacaagcccagccacgctgatgattgatgtcacagcacagtcacacacatgacctttgagattcgggggaataactgtttcggaggaggctggcggtctcaaccttggttccatcattttctgccacttaccctgtttttttcacctgtaaaattgttattctaaaaacccaaatcaggggttccagcaaacggggaaatgatagctgctagatgatgattagccaagtctcacaaaattgcagctcaagaaactggggctctgagaggttaagttcctgctccgaggccacccagctgaggagtgagttgtttggattagggcctgactaagtagcaccaaggactgcacatcttaggtgccatgagctgtggcctctcaaaggaaaggaggggagggcctgaggcttaactgaacacttgcaggctgagccagaacctgccctgtgggctgccaggccttcaggggtgtgcagggagaggcgtcccactcccatggcccagggaggagcactggggacgagtgatgggagtggcagccacttcctgctagaagacagcccagtgagttccctgggtgtcctttaccctggagccctcccctctatgagccttttggacccaagactgcaggccccactctcactgaggctaggacaccacaagcagcttcctcccttcctcctttctgatatttgctgaggctgctgtgtgccttgtcctgggtactaaagacacaaggcagacacagccctccccagtggcagtagcttgtaaaggccctgatggagagaacacagggcattgtggtcccagaggatagggctcctcacccagacttaggggctggaagagggcttcctggagggagagctgttgaagctgagagcagaggaattatccagggaaagagggcaggagagcaggtttcaggcaaagatcagcatgcacaagggcctggagaggtcaggtcacaaaaggtcttgaagtctgtgctagagagtctggcctttactccagggcccctggaagccatgaaaaggttctaagcaggggggtgtcatgtcagatttgaggttacaacatgcactctggctgctgtgtggattgcaaggggaggtggggggccagaaaagagagtggatggaggctgtggacacggggaaaggggcgctacaaggtagtgttcaagtgtgtgcaccctagtgcacacgactgcaagtacacgtgtgcgtaggtgtgtgtagggggtgtcagggacttgagctgaatgagagccccaccttgtcctctaggtcagggctcacccagcatccggcacagggaatggcccatggtagagactcagtgaatatgtgcagttcagatctcagtgggcaccaggcgtccgtggctgtgtgtgcgtgcatgcaggcacatgtatgtgcgagtgtgtctctagagatgtatgtgcacatgacaagtggtgaggtggcatctctctggccatactccctgggtgggacccaggaagccttgggcaagagggtaggcagcggttggcctggtctggactggcccagcctggcataggacaccttgcacccagccagaggccaccagcataagctctgcttagcttttgtgccagtgctatcagtcagggagttatcgctgctgcaagcatacctgccttactcactgcagctgagctgatcacaggcagtggtgggcggtggcactgtgctctggaaccggcagcatctggagaggcaggctcagctcctccttggggactctggcttattcttctgaattcagatgccagagcatacggcaggagcagcgcctgtgtcagtgtgtgtgtgtcagtgtgtgtgtccctgtgtgtgctgtgggtgtgtccctgagcctgcacgtcaccctctgtgcctgtggctgagggtgcccacctgtcactttgtgagcacagcttagggtgccctgtatctgtgtgcactggtgcagtcaggcatttgcgtgtgcatttgtgtgtgggggtggggggttgtgggtgattctgtggtgtgtggcatacaggttcatcctgaggatgctgtgtgagtctgggtgtccgtgtggtgttggccattgtgggctaatgtgtcagggcatgggaagggcgtgcacctgtgtcactgtgggccctgcgggtgtgatgtatggatgtgggctgggtgtgacaggcagagcagcagatggccaatcctggcctgtgacgtccatgaccaaggctccgagagccagcccaggtttcggcgggaatttcctttcacctctatcacgtgcaggggagggcggggtgatgatgggtgactgccttcagggactgtggtgcctgtcctcccccccccccgccccccgctctctgtactgggaacagtacagtaccctcccctcctctctgtcttctcaggaacttggccctgctgtagcctcagggccaaagggatggacacccagggccccctccgaccatgggccctaaaccccgagaggacgcacaatccccactcctcccgctccgcagccctgcccggggacctgctttggcccatggcaggcagccttgtccaggctgggatctcagggtctggaagcgcccaggctgcctggggaagcatggggagagggggcagcagttccagggcagggggcaggttcccgaagcctgaggagctcctggcccaggtgagcccctctctgctggtgtccctggcaggtgggtcccgacaggaatgctccggtgggggtgccctgctgctgtgccctcccaggtgcacctgcccatctctcccaacaggtgtgccctgacaggtgtgcccggatggagtttccctgggaggagcaaggtgaacgacggggcctccagggctccccaggactccctgcagcctctgcaccaccctgcagcccaggaggccagtgccctccctgctgccactggctgccctgcccgcagccctgccaccctggggagctgaccccgaccccacccggccccccacgtcccagctcgggggctcacaaagggagaggagggaagagcaaaatcgcagagatttgtcttgtctggggctgacagcggagcgagtgattgccaggcccgcttggcagtttttaatcattttatctctgttctcggctctcgggggagacagccagtgcttagcagtctgctcagaaagacctcggggcgcgtggcgcagcggcggctcggagctcccattattagctgtgctcttcggagcgcgctccgatctctcccgggggagccggtgaaaaattaacacgggccggcggcgcgggcgcccgatgtaactgtaattactccattgatattcctcacacaatagcgctgtcatcagtcatttacataaactttctctccccaggacgggcggaggtgcctaatcctattgggcgcttccactgcatgcattatacatggcagctcctaggtgcggactgagggaggggcggatagccgggctctaggtgaggagggagggaataattgggaaggagaattggagaggagagagaagggggaggagaggaggaaaggggaggggaaaggagagttgggaaggagaattggagaggagagaagaggctggtaggagaagaggggaggggaggggaaggaagggaataattggacaagagaaaaggagaggaaagagaggaggggagggagagacagtgaggcaggggcagagccagaagctatctctagagggtggggcccccagatgggctggagcccagtggcgctggggtcccgctttgccgggtgagggtccctctgcatcctggggccggtccccgagggctcggtaatggggctcccagccagcctgcccctccatcatctgtctggcctggagcaggtgaatctgattctccaggggcctcgaacaaagccgggcccatgccccacccctctacccgcctggagggtctcaccctaagctccactgggctcgggctggaggctcttcagctgctaaggagttaaaacctccctggaaattatcctgtaatgacctaattaaagacttcgggccacctactctggggtgaaagctaataacacacgcccaacaataataatcccagcggagcccccctgttattgccgcagcctggccccttcccaccaacctcagctgacagtctcccctggccctgcctgtgcaagctgttagtgactggggaggggggcagaggagggctcaggatgggaccaaggggagaggcccaggatagtcaaatttccattgctgaatatttaatgaggcccatgcggtttatttggttggcctgtcgatttttattcttctgtcaatagcttctcatatgtggggctgtgatgatctttagcagggcctctccagggacggctgccactaaatgcaattatggattttatacctcaatgtgtttgatatttccactgatctaatttgcagcctggtagtttattgtttggcattttaatggcgctcaaatgctatgggaaatttgatttctttttataattcctccttaacgcagttaatgcgggtggcgggatggcccagattttagagcccaatgtatagaaagaagaagggaggaggaaaaaaagagaacaccccgttgtatatatttaaagatgtgtccgttgaagggggagccctttgggccctgggtcccagatgcctgctgcttccagagcggggacctctgaggactggcctagggagctggggctgaggtgtgggggtgctggtggtggtaccaaggttcagtcagagggaccagcgggcagccctgtgcctcaggtatcctgagctctgcaccctgtaggccttggtatgggacccctccaagtggcttcaggtgactgtcctacccagtctgggcagctgcagagccaagaaggccagtccttccactggcaccagtttttgtgacctgtatctgagggcaggggctgcaccagtcctgggcctttgagggtgggggtgattctgtgacatgcctgtcatgtatgtgacaagtccttgtggggtctcaccatgttcaccagatgtgtcctcttcccaagttcccaggccaagggtatctctgcctctgtacccacctgtacctctccttcttgtcctggcctccttgggaagggtaggtgtgggagcatggccaggataggccagggctgatcactgtcccagagctcggttccaggctgtgctggtccttttttcaggctggactgagggcagacaggatgctggcgtcccagagcaagctggaggctcccacctcttcgggcagttcccccaagctaagcttcctgctttcctgacagtgagtccgcaggctgggtggccagccaggggtggccttctgccctcagatagcagggtggggtcagaggggacactcggagagccatatagcaggacagctcgggccagactaccagcaattgttctggactttctaaaacagcctctggggaaaaggagttgagagagactccagaagcacttccaagtgacctgcctggaagtgaccaggggaaacggtccaagacgagtacaccgagtttctccacgaggcacagagctgagtaggcaacctggcacgggggcatgtggaaggagctgtgggaaacagccttgggccttctggggaggtctgtgcaggctcctctggcctgtaggccccgagttctggtctggaaggtcccctttcctggagcacaggggagcctgaagtccaggcctctgagatgatagtcataattaaagctgctgttgactgaacactctctgtgtgctgagcactgtactaagtgccttgcaaccatcatctctctgcatcctcaggaagcataggtaccatcagtatcctcatcttatggaggcacagactgaggctctgagagttttatgtcacctgcctgaggtcatagctaatagcaggaacaggacatgaacccatgtctgcatatcttcatgggccctgcacttagccatggtgcctgatagtatggtcttctcgggcctgagctgggctgggctgggttaggcgaccacccccacccagctgggttcctccctgtcttgccacctcccgcttctgttcagcagctcaagtttctgtccttgagccagtccctccgctggaacccaccacgctgcttgctgagctgcactggggaggctctttcttcaaggggactctcttctccctcctcctgggggattccagtctcaccatctctcccaggtttctgctggatccaatccaccttccacacagctgctgtccacagcacccagcctcttgccactcacgcgtgagcaattgtggtcacagctgatgtgcccccatcccagcgaggccctgggcagagcacttcacccacgttctctcagaactctgtgagatagggaccagcttatccccattttacagatgacgcaacagcctcagagcagacccattcctgctggggtcctagctaagattcacagcttcccccaacaaccccttcgaagcccccacctggaacagttcttccaccccacagctctggtgtgtctcgtggcacctaatgccaaggcagtttgtgctcatatgtgtgtccctggccagcctaggaggctggagctgagtctgtcctgctcgcagtctgcctgctgctgctacaacagggcctggcacacccgggcctgggaaagattcctgagcacgcagctggctgagcggacctgtgagtgcatatgtgtgtgtgagtgaagtccccagatcctgtgtcccaaacctctcctcacagccattccaagatctcctggccccttccagagagattgcagccctgatgccagggcttcaggtggttcaccgtctttcttccacccgccctcggtgctatcaccagagcttcagtgccacccacactcccacttcccctgtctacactgtttcctccaccaagaatgcttttttccttctcttcaccgggcaaactctgcttctcccaggtcatcccccgaagagccaccccaggttgcctggaggggctggccctgcctcctctgggcacccccagctgtcccagcccttgtcatgtggctttgccaccgtctccctcactgcatgggtgttcccggagggtgggtctctactgccataatatagacactggggagggtctgctgagtgaatggagtgaaacaagggggaagaaatgcttctgttgatcatcttagatcattctccttgtcttggaggcatgagacagactacctttctgctcattcagaaattcccaccctggggtggaagggaaaatggactgaaaccccgtcagccctggttgtggacagggaccccgtccagggatgatggatctgcagcccgggaaatcgggaattggcctcaccctgtgtctgggtgttaagtggactgcgctctcttcccacccccagtcagtgaaatcagacctgaataatctgatgttccacttaggaaagaaaacaggattccccagcctgggaggagctgaggctgcagtgggcaggggcacagcttgctggtgtcagtatcagccatcaggggcctgataagatcttcacagcttgttatcccgggtcaggctgacttgtgtgcacagctgggggctaggggtggaggctggggggcagttctccaggtagctggatcagctctcagtaacctgcctgtggtgaggtgaggagctgggtactttccagacagctgcaggaggaactgggggtctcagggcctctgtctgcccctgggagcgccaactctctttgaggctcaagtgcacctttgatagagccagcagaacagatgaatggggatggcatggtgcagtgggtcatgcagactcggcagtgtgaccctggctcagtcactgcccactgtgagtccttgggcaactcacaaaacctctctgaacctccgttgcctcctctctaactggggagcacaatctgtactcccctagattgttgacaagatttagtgatatcctgtttgtccctgacacagctgagcagctcaacaaattaggtgtacatagcaatcattcattatcccagctgggacacttttgggcaaaaggggatgtcattagtaattatgctgggaccacaagtataagccaggactgtcctgagcatcctgggatctctggtcacctgtcagtacagggccacagggtgtgtccgtggactcccttgtgtttccccagtacttggtggtggttgaagggcttctggggtcttgaaaaggaattaactcgaatcaatactgtataacctttatggagcacttcttgtgtgccaggcactgtgttttctcattgaattgtcacagtagccctaccaggtagacgccactttcatgcccactttgcacatgaggaaactgaggctcggggtcaagtgacttgccaaggtctcacagccagaaagtggcagaactagaaacaggtctggccagctccaccaagggagtctcagtcactggcccgcactgcccagcagcagagaggagaagaggcccggctgataaaggccatctggaggccaggtgggagtcatctcaccctgccaggtaacggggctggtgggcccgcgctggtctctccgggtcctcggtgtcctgtgcccccaccggggggtatctgctgaagtcgtttcccaggctggagagtctcccccatcagctcagcagctgtcaggattaaagaatgagatgaggagagaaatccataaagtgcgagtttggaaaaacctgtttgttgggtgagctattgatcgaccgactggcccttcccaagtcagcatttaagctttaatggccagcagaggatggtggagtcaggctcagaagagggaggggggaaagttcactctctcccacactattcttctcccgcataactggctcccttctctaggacgggggtagggagtgcccgcccttcccgcagccttaggacagttatctttggggatcaattgttccctagtctaaggctccttgtttaattctgcaaagccccatggccccctgcattgtgggattatagagtgaaatgctcagagtggtccctccatgaaacagggctcggggaagataatggctttgccctctggctcagccgagtgagaactctactttgccacttcctggccgtgtccctgcccttccctgagcctcggcttccctgtctgtaaaatgggaccaccaccttcgcagggtatgtagtcgggggttgaagctgatggaagttcctggctgcagcttccttaggcgggagctggtggagacaggcgtgtttcacctgggattctctcaaccaagacaggccctttcagcaattctgttgagttcctcagaatccctgccaagcgctgacaaggacggagggcctgggggcttctcctgccctcccagcccacctgctgtcagtctgccgtgatagagcccccaccctatggagacactcggctcccctgtcccacctggcccagcggcataggcgtcctgccacgctgtgttgttccagctcgctttgaatcgcgttcatctggctgggttccccccctaccacccaccaccgccccactggaggtccatgtggaagaccatcgctcagaccagggatctcacctcccagagaccacctctcccagacaccactccagatgggcacctttctccagaactctgcacttgatccctggcagacccgttcactggcatctcccctgggcctagtcagccctgtggagggacacaggaaggactcagacccggagcctgtccttggggagcacccagtcttgtcagtcttgtgagggagacatacatgggatcccaaatccctgctgtacttcaggtctgtcctccagccaggcagggagcagggccatctctaacccaccccttcttgcaagggacatcgttcccaagctgagcacagactgaatttcaacccactcactcctccgaggagcatcttgttcagtgaacaacctacacaaccacatagggcagcctgctgggggaagatcctcggaggagaagtcaacagtgtagatcccttaagtcagagatgctgctggcaaggctgagggtggaagacctgccctccaggagccttgagcacacaaggagggaggtcaggggatgatgtctctggagaaccattccaggaggagctagcgaggaagtgggctttgtcctcggaattcatggattccatgtttaagagttggagttgactctcgagtccaaagggagccacaggggatttccagcaagagagctctggaaccccaactgctttgtggaggatggggtgggggagaagccgctgagggagggaggtcaggaaaacagccccaccgtgcccctgagatagaagtccagtgagggtagggcctgctctggctctcagaacatgcttggtaccatatctgccacctagtaggcattcgagaaatacttcctgagccgattattaaaccaggggaaagggttagaatcctagctcacttctcctcatttaaggcctgagatccctgccttcttggcagtgtgattaggggcagaatattgggctaaactctgttcctcctctcagaaaacctgtttttgctctatgttgatatgaagtgacatgtcagggtaaaatatggatgacaagagggaagtctgcgtatctaaaaaagcaggaaggtgtgcctgatccctcccactctcatttgtccatccacctacctactcatccagccacctacctatccatccatctacctacccatccatccatctacctacccatccacccatctatccgcttatccgcctacctgtccatcaatctacccatccatccatccatccatccagccctccctctgtctttccatccatgcagtagtcactcaggatccacttcatacagaccccatgttaggcaaataaagatacagtgaaacctacaggcatcacctgccctcgggggcccacagtccaggggagagattgactgtccaggtggccaggtgcagcctgcccctctcccgtggggccagagccaggttgcgcccctgtaagatgagcccctcagcccctgggttctacttctggtggatgagcagagtctgccagagactgtgttcccagaaccagactcttggtccaatcagcaaatctttgtcaagctcctgccctgtgcagaccctgccctttcactgagacacagcagacaaggttcctgttcatactcaccctctgctccttgtgctggctctggaatcgctaaggtacattgaacaaccggctcctaacactgaggtcacagtctaacaagggggtagggggtggaacacacaatgtgataggtgctctagcattaaggttcaaggggtcgttaaaaggaaagactaacacattttgctttggtggatcagggaaggtcttatgtaagaggaaacaaatgagatcactcttttgaccaaatattgttttaaaaattattacaaaagcagtatggtgcacacctgttcccagccagtcaggagacaggctggcggatcgcttgagcccaggagttcaagtctgcagtgtgctatgatggcacctgtgaatagccactgcactccagcctgagcaacagagtgagactccatctcaagaaaaaaaaaatgctaggaaaaattcaaataatacagactatataagcaaagaaatgaaagatccttccccctactccaagcctagtccctgaagataaactcccttagaaggtggaataacttcctctggacatcgttcgacacatttacattctgttctacatgcataactttgggacacgccgggaccgtgctgcacatgctttttggcagcttgcatttttcacttgcccgttcctttcaccttggcgccttcagctcctcctcactgtgcaccggcatagtgttcatttaactagtcccctgatgatggacagtggggtttgcatcctggccttttgaccccttgactttcactcaaatctgcctggtttaagaatggtcagtggctcagggtgctgaagtgttgtgtgcttcagggggaaatccatgacccagcagttccttccaggaagccacgcagggaggacccttggaactgatggctcctgcacagggcagtgtggagccctggcccaagcatgaggttactagcttcttggggaagcccagggatgttagcgcaacaccaggcccaactccgcaagcccacactgtgtcctttgggaaatgagaagcctcgagcagccagcctgaggcagttccaggcatggactgggtgagttcacagggacacagacctctctccccagagatccgacatctgcctccaaccctccatcctcctgtccccagggagctgccgtctgtgccctcccactctgctctcctgaccctggcagctccctgggtgatgggaaaggcagctttccagctggtggccctgactctatgcacaatgcatttttattttttcagcacgttgtgaaattcataactcccagtaatgacttcctcactgaactgggaaaagggaaggggagaaaaagggcctataagaaaaatgaaccgtggcaggcgtggactccatttgtaacaatatggaaattgatcgttgagtcagaggaaagtttgcttagctgtgctcggcactaatagccgggaacattagtgaacccagggaatgagttataggcgcattaaggaggcttcgaggctccctagcctccctcgaaggcaggtcccagccctgcgggtctgcccaccctggcactggctccttcctgccctgggagaaccaggccaggctctgtgctagagaaaaatgcaagcaccatcttgatggagtgttgggggcgggacccggcttcaaatctcaactcctccctcctgtgagctgtggtacccagggcaggtgacttggcttctcccagtcttgattttctcatccgtaaaatggtgttaattatccatctcagggggcatgagaggactggggacgatcattaatataaagcaaggagcacagagattgggcatgttggtggcacagcaagctggatggatagatcgatggacaggtacatgagtgatgactcttcaggtgaagatgaggcctggaatctgggggatgctgggctgcccgttggaggcaccaggggtggcaaggctgcctaggaccatagaggttaccaggactgagggggctgtgacagtagggactgaaagttgggaccaggtaattgggtggagggaggcaatggcttgcagcctcctctgcacgtggtcaactcccagaggcagagctccacccggatcaggccatgccgcacgggaagctctgctggtcctttagaagcagcatgatctgaagtcatggtccttacacccgcccatccagaacctggcctgcttgcctgcttcctgtcttggtgagaggcacctaccatcttcccaggtacttaggtctaagctacctgtatcttccttgttgctccctctccctcacctacaggctgaccatttgaccccctgaccatcactcaaatctgtccccttctctccgtccccttcacctcccctatcccaggcctccccatccctcctctgaacaactgcatcaacctcttcctggcctccctgcctgctgtctgcctccccggccctgaagtcagagtgaacttttttaaggtctgaccctgtcacttgcttgcttaaaagccttccatgctcttatcaccctttcagggactcaagacctctaggaatcttccagaggcatctctcctgcttttcctccctgcgtcctcccagccccgtcccttgtgtgctctagaaccagagttctccaactcaagcaggcctcagaatcccctggcaagcctgttcaactatggattggcaccgctactttcccagagtttctgatttagtgagtctgggctggggcccaagaatttgcatatctaacaagatcccaggtgatgctgaggccactgatgggggaacctcatcttgagaacctctgttgttttatttttatttttttgagacagggtcttgctctgtcccccaggctggagtgcagtggcgcagtcttggctcactgccatctctgcctcttggactcaagtgatcctccccatctcagcctcccaagtagctgggactatgggcatatgccaccatgcctggctaatttttgtatttttgtgtagagaccaggtttcgccatctttcccaggctagtctcaaactcctgagctcaagcaatctgcccaccttggcctcccaaagtgctaggattacaggtgtgagccaccgagcctggcagagaaccactggtgcaagcacaacaaattttgtactgttctcaaacatcagttccatccctgcttgcgaagcttggcacctgctgtgcctgctgttgagaatgttccttcttccccttctcagcttggtgagcccctgttcatcctctcctacatcccccagcagaggcagcagccaggagcccctctgttcagcagccttttgtctctgtttgtcccacatgctggggactcctgagcccactgaggagggctgggcataggagacttcagataaggagcttcctgccctgccccgaagtcggtggcatgttctggcacgtcaagtgagggacttggccgccagggatgtgggccatctgtagggtcacagaccttggtcatcttttctaggggccagagggagcagaggcctctgggaagccgagaccagagctgcagctctgaccggtcagctgagaggcaggcgggagctccgagggggcagccttgttttgttttaatcatgggtgagatgctgatgtggccctccctggggacgataaaggggaggccagccccatgggcggtggaggcgcttctgcaaacagcgagggaaacccgagtcagcagcggccagggagaaggaccagttgtcctggaaagaggatgttaatgacaccggagggcagcgggaaagccccaggcaggcctggtggccccctcgctcctggcctctcggcactgcccaccactcaggccagcccctctcccttcctgaggccagtgtggccggggcaggcaggagcccgctaggagcctccaagccgctggaagttgttggctgcagcaaaacttgctgcgcatcctttctgtgggtgccctgggcggccctcggcaggcagggaaactgctcgccatacctattttaaacaccagtgtaatggtttatggcccatagagggataattacggagtgcagaacccagcttttatggcccctcctccccggggcacacttagagaacagtatgtgtcatgtagccaatttagataatgattctgataaagataaacggaattgtttattataagtaattgagtctgctaaggcccagatgaggcggtgatggggaaggactcctaggatgtggggacatggggacaggtcctggatggggctccagggtggaggagaagggcctgcccctctctccctccccatctctctctctctctccctccccatctctctctctctccctccttctctccgtgctggggctgactgatcctcctccatcccgggcagaggctgctcctgggcataaataaatcatggggttttctgttgagtcagctgagtgggggaggcacctggaaggagggactggggggggtggctccaagctgccccgggaagggcagcctggcctatctgtccccagaccccgagggctgccatcctcctcagcaggcagctggcaggtgcaaggggtggggcacagggggcgggggtcagcccagagctgagactgcagggttgtctcaaggggacagcggcctcctgttgggggtctttgtgaaggataaacaaaacgaagggccttggagcccaccttcttctccccccctcccaacaacacacacacctgagacctctaattacgccttagccccaggcagggccatgggaacgctgccctgtaacccactgcctgacccctctcccctgggccccgctcctctcctgaggccgactcagttctcactgcagggaggagaggggtcccacagacccagattcaggaacatggggtgctcagaaattagagcctctgagaacagggtccctgtccccagcatctctgagatgaggatcccacagaccagggtctgagctgggagttcaacaggcggggtctgctctgaggaatccgacaaactggtgagtcccctatgagtaggaccctacaagccaggggcctaggtggaggatcccacaatctagtttgaacagggaccctaccagccagggccatcgagacaaaaagaaacccaaatcaaaccacaagcctcggtagtggccagagatgggggggggcctgcctgcggtgggatactccaaggcttgggggtcccaacagccaggacccttgaggcagggtcctcacaacagagatccagtggcccctcagacccaggtggaggggcccggcttggctgcctgaggctgcagctctcccgattgaaacccaaaccggaggagctgcctgtcacggtgcctgtgatcctgtgatccgaggcatgattgagagggggcgcggcaggagggggctgcaggcccccaggcagcccctgtgtggagcagcaggagtctgaggaggagaaggggggggggattttctctttcttcccggcctgcttatctgatcacagaggagggaagggctcccgttcaaaggcagtctccttatcagctgggggtttgtttggaacgataactgcacctggcagggaagccttcctgcaggtgggggtgcggccgcatgggcggggctggctccagggtgtgtgtgtccacacgggaacgtggctaccgctaatgctacgtgaatgtgcatcccatggtcttcgtgtgtgcaggtctgtcctccgtgtgtacacatctccaggccagtttgtgctcccacctgtgcgtgactgtgtgtgtgtgtggatgggcacagagtacatctgccctcggcacaggagaaagaagggactcagatctgggcctggactggactgggcactgcttggcgtccacatgatgggggtccctgccaatcccacccatgtcctgtctccagagtgaagtacctggagcctgtgggaacaaggggatgggtcaggagcagaggttgtgacatcacagttcacttgtgggcacagcagggacaatggggaagaggctccatggatgctgaggtgtagccccagcgggtgttgatggagaagaaaagagcctgtggagaggccaaggcacgggccagatcaggggagcaggatgggccagctgagggctgggcaagactgaaaacaaacccagcaaaagggcccagggttgcctgaagataggaacagagcggtgcctgggtctttttgtgctaggagctgatttagcttaaaacacatccccccatcccaaacccaaacccattcccctctgtgttttgttttgtttcaagtagatgcttttttttttttttttttttttttttttgagacaaggtctcacttggtcacccgggctggagtgcagtggcacaatcacagctctctgcagccttgacctgccaggctgaagcaattctcctacctcagctacccccgatgagctgggactacaggtgaatgccaccacatccactaattttttgtatttttttgtagagatggggttttgccatgttgctcaacctggtctccaacttctgggctcaattgctctgcctgccttgacctcccgaagtgttgggattacaggcttgacccaccatgcctggccctaagtagatgctttttaattcagctttttattttgagataattgtagattcataggcaattgcaaaaaatagagaggtccctgtaccctttgcccagtcttgcacagccgcgggacaacatcacagctaggacgtccacgtcaacacagtgccgactgcacttagacttctccagtgttgggtgcgtttgtgcatggagctctgtgccaatttatcacatgcgaacgttcccggatctgcccccacaggatccctcctgttgccctttcatgaccacactcagctccctcccacccttcatccccagccccctgggttgtgttgtgttgttttgttatttaatcttattaaatggcacctccacctcccaggcccccaagctgaacattaggacgttgtcttggtatctctcatctttactccccaccccctgcatcaggccaatggttggccatccaggcctggacattcactctattaatcatttctggaactctccccttctctccattggacctggactcccagctcccaggcttggtcttgccaatccacccagcactcactgccataccccgatcccctacagctccaccattcttaggataagaatgtggaatatgccgctgctggggccctactcatcccaccagtctccactctctgtgtttgttccagcccttctgagccactcccgagatgccacactgtcctggctgcgcccactcaggcttcctcctcttgggcagctcctgcccttgcgcaggtttcagctgaacgtcctatcccgggaaccttccctgacactctgctcagggttgctgccccctggctgggctcccacagacccccatgcctcccccactccagccctgatttcacgtattgtcatggtctgtttactcagcagccttccccagagacagcaaataacttggaggcagagactgtgtctggtttagtgtggtgagcctgtctatgaggtggggaacgggcacctgaatctagtttgtgtgaatgatgaacaggtaggttggtggtaggtaccaggttggcctggcatgcccacttagggtggaggcagccagccaggggctggagcaggtagaaggagagactgtttgcttctctcttgcccaaactgtagccacacatcccagaatggagccttccccatgtgccctctgtcttctcccagtgactccactgccgaggtctgagcacctggctctagagaaggaaacgaggagcaactgctgagtgcctgctggatgccagactctgagcatgccacggagagccaggtgggcccatgagaagaggagagggtaggcttggtatctctcatctttactccccaccccctgcatcaggctaatggttggccatccaggcctagacattcaccctactaatcatttctggaactctccccttctctccactggacctgggctcccagcccccaggcctggtcttgccaacctacccagcactcactgccatacccccatcccccacagctgtgacacccagtcctgggtctgttgcttcctgttgtgacctggggcaagtccctttaccctgtgaaatggggcggtggtgttaggatcttcctcatgcactcctgggaggagcaaaggaagaggtgatgagagtgaatgtgacgaagacttgtgcttttgccatgggataatcaactttttggaggtgcccaaagatgccctggcctggggccactgtcaggaggttgtccgcagctcagccctgaccactgcttggcctcagaggccttgtgagccttgccgcctcacccgatgtggtggcccccttcgatgagggcatctgagggtcctggctgccctagaccacccctccagcactggaggcagtggcaggtgctggaggagaatgccggtgggggtgagggagctggccagggacacctgcccagcacagaggaattctgtctcaagagggaagacaaacagatggtaaggggagctttaaggtgaccgtgtcatggagtggaatcccggctttgtcccctactagctgagaggccctccacgtggtaagcagcaaggagggagaggtttctcctgttttgttcacggatgtattcttagacccagagcaatgcctggcacgtagtaggggctaaaaaaagtgcttgttgaatgaatgaatcaaccttgggtgaatcactttgctaagcttcccttggaaatggagatacaatgatactgtttgttttgttttaggtattgttttcataacataaaatttcacataacataaaattcaccattttgaagtgtacaattcagtggtttttagtatgctcacaaagttgggtgctgctgttttgatcattgaaagtagtgcctggctcacagctgcgccatggatgtcaggtcgtcttttcgtttatgatgcacacctgctacttcccaaaagggtatagacagcttccaagaggaggcgaagagtcagtcaggttctcaaaaataaaagcagaggatcaaatccctagagtgtacgggggaagtatgtcaaatgcccaggccaatctccactgaagtagaggattaaattgaactctgagcatcctagcagcccaggtggaaggaaaaatgggatgagagagagaattcacattgtctgaccacaggaggctgatgagttcattgggagaatagatatatttttaccaaatttattttttgcagtttccttaaatgaggaatggaaaacagacaggtgtcaatgagcacctctgttgaagtgaaatattaaacaagatcttcaggccggatgcagtagctcacacctgtaatcccagcacttcgagaggccaaggcaggcagatcacttgagctcaggagttcaagaccagcctgggcaacatagtgagatctggtctttagatagatagatagatagatagatagatagatagatagatagatagatagataggatagatagatcctcagaggccatctccccaggctcatggtttcagacagacaaggacgaaggcctcagaagccacttggaggaggcatttctgaaggccactgtaccgaggaaggaagggatgtgatgcctcagggaactcttgggacatggggagaggtgggagcctagctggagggcagtggtgtgttcctcctgcccatccctcaagcctgcatgctctcagcaggtgagagctgagttctctgacatatgagtctaaaacagttgactgcaaggtttctcaggctcagcaggttgatgtggtgggtcagctcatgctttgttgtgggaggctgtcctatgcatgtagggtgttcagcagcatctcagctgccactcacaggatgccactggcaccgcatcccccagtccatggccatcaaaaatgtctccagacatggctgaatgccccttgaggcaaaatcacctctaattgagaagcactgagtagggaaagacaccaggccctctgaccttctatgtgccagaccctcaaaactccctctatcccagatctggctttttcctattgcctgatgaaagaaggattcacactcttaggggtggccctggtcacctaacacttgcctggccctactgccaccttttaagcagcacttgtgcaattttttcaatattttattgcattttgttctgagattttgaaaaagtaaaataagtgagaactgggcaaaataaaagcactattactagtaagaagaaacatttttcccacaaaggtagacatcaccagcttggcaaagtgaacataagactgtctgatggtgaagagaaataatgacatttaaacacataaatatggtagagcataaaatgctggcaagtatctttcttggtcaggtatctgatatgacgcacaaaatgcatgaaataggcaaagcatatttgagaatctgaccctactttcagttctctgcaagcagaactctgcttatgtgcaagtctgttccccaatggtgacatgtttccaggatcaccttatccttgggagcaggggatgcctgcctgcatctggggtcaggactggggttggggggagaagatccacagactttggatcctggaagcctcctcagggaggctggctgggcatcctcaccacagagcccttgccatttccacaggggcacgcatgccctggctctgcagctcccgggccagagttttggaagtgggagaatcttgatgcatccattcattcattcaggcaagcattcggccactagtgaggacttgcttatgcgccagccagcgtatgagatgaagaacataccaagataagtcaaggaaccgcagggagctcccagttttgtgagatcacctagggctgtccatttctgtgatgcaggacattccctgcatgagggcacccagcctaggagtgagttggggactggacctggcacagtcctttgtctggccagaagaaggggtgcctgcctcacttagcagcacagtccagggtgggctagccgtccagtgatcagagtttccagaagaggctgggcaagaggccctacttaggtccttgcttgggggaataagcagtgggatggggaggtcttagaagaggggccaagggacctgagtgggaacaaccaagccggagactcctgggtatgaagggcagagagggaatccccagccaagtgcagaggtcaggggtctgtgtctggggaatgtgggggctgggttgtaggagtgggacagggcaggaggggggtgagtctacaaagggtaccaaatgtcaggcttggggtttggagaaagggagtcaagcctctaaaatgagggagggacttactagctctggatccctttggccagggtgtggggagtgggtaacagcaagccagcctcaaattcggctggccctccccctggctgccgggcccgggcacccctgctgctgaccccctgccctccctgccgcctgccagccccctccctctggtccacattcccagctcctgattagatttgggaaggactaattagatataattcattatcctcaaaaatgagatcagaaatcaggagctctcctcagaagaaggtggcctcgcccctcatccatcatgcctctaagtaaccaatttaaaggcaggcggccgcacccggcagcgttattaccttgtcataaatagttaggggaaggcccccgaacgaggcagctttataaatggcttttatcacattagtttgcagttatttgtcatccactttgcttaagataaatgccgaacaaataatcaaattatcaagccaaaacctgggaaagtcatttgcattcattgcagcaggagagaccgggggttcaaattcagaaagcccccttgcctgtatcaggcctggtttgctgtggagagaaggaggacttcctggggacatgagaagtccatactggaggcaagaggcacccagaagccccacataggatggggcaggcctgatccaaggctgggatacagggtgggagggacccttcagggggctgagaggcgggtgttctggggctggggtctgccgaggtatcctctccttcatgcacgcacagagaggcatgcagacgctcagacgcactcacaggcacacttcttactgtctgttgctgggagccagggccttttgtctagccccagaagggccctgtcacaggcctgaatgggcccccttcccccatagagagtgacagcttcaggcaactcatgccccaagcctgtctggttcttgtcctggccaccagtgctgggcaggtggtgaggagggtcccaggcctgggcagaacgtgtccaggggcactgctgaccctctcccagctgggctgggaaggcgccctccagcagcggctccttagtggagaatggcaatttcacgctgtccccaggaggctgtcctgtgctccagctgggccagggctaggtcggccctgtaggcccccatccctcctcatcccagcagggcgggcatggcccatccagcctctccacacattctcaggccaggggctctgctggctctgatgatgctggcttagcttcagaggtggtcctgtgtgggggtgcctataccggccttagagattgtcctgtatgtgtgtctatactggccttagagattgtcctgtgtgtgtgtctatactagccttagagattgtcctgtgtggggatgtctacactggccttagagattattctatctgggggtgcctacactggccttagagattgtcctgtgtgtttgtctacactagccttagagattgtcctatgtgggaatgtctacactggcttcagagattatcttgtatgtgtgtctacacaggccttggagattgtcctgtgtgggagtgtctgcactggccttagagattgtcctatctggggtgcctacactggtcttagagattgtcctgtgtgtttgtctacactagccttagagattgtcctgtgtgggggtgtctacactggcttcaaaggttgtcctgtgtgtgtctacactggccttggaaattgtcctgtgtgggggtgtctacactggcttcagaggttgtcctgcgtgggggtgtctacactggcttcagaggttgtcctgtgtgggggtgtctacactgcccttagagattgtcctgtgtggggatgtctacactggccttagagattgtcctgtgtgggggtatctacactggcttcagaggttgtcctgtgtgggggtgtctacactggccttagagattgttctgtgtgggggtgtctaccctagccttagagattgtcctgtgtgggggtgtctacactggcttcagaggttgtcctatgtgtgtgtctacgctggccttatagtttgtcctggtgtggccaaggcaatgtaagctttctgtggtccgtgtacaactgcttggagctgcccaagaagtgacttctaagggcagtgtaaatagtatagcaatgaatgtggatgctgcagccaggtggcctggggtcaaaccccagctcgactactgtgagactttggacaagacacttaccctctttgtgccccagttttctcatctgtaaactggagttagtagcagtagccacctccactggtcactgtgagagttaactgagttaacattgtgaaaggcttgtatcaaagcctagaacatggtaaacccatagaagagcttggaatccatgtgagggggattgcaaaggctgatgtgaacccttggggtgatctccactgaactctactatttatctgccccttctttcacctaacaacagtattccctgagcccgtagtgtggctgtggcggcagctccaaccaagccagttgaagtcaatgcctactgtggttcttgggttggactcaacacaaatgatgaaacaggcagtgacagggcattttgggagacgccatgataggggacccacaggcagctgctggagagtcagaacaggagtgctcaaccagtcaagggaccccacagaggatgtccctacaaaagcaacgtctaaacttagagctgggatctgggatgggtaagaggtagccaggggaagaagaatggaaatttggaaaacatcccacatgggacagcctcacacaaggcagcctctaaccgtagtagacacgcccatacacaggacaacctctgaggccagtgtggatgccctgacacagggcgacccctcaagctaatgtggacaccccacgcagggcgacctctcaggccagcgtggacgccccacgcagggcgacctcccaggccagcgtggacgccccacgcagggcgacctctcaggccagcgtggacgcctcatgcctggcccccttcaaggccctgttggcttctctccaggaactctgtctgtcggggccagagtgggtttctgagcagttggacagactaggcagccaggatggggcagctgctctgggtatggtgggtggagggccactgtagggggcacagaggctgagccgaagcacatggtcgctgtctgtttgtggggcagcaggagcaggtttaatgggccagccccggaggccatggagaggcggctttcagaggaaccccagacaagggaggcccctccctcctgccccaactgccccagctcagctgggccaccaggagcctggggctctgtggagccctgtggggccccgcccacccctccccacctgccagcctgcagtgtggctgcggggcccgagttgagcaggcacctgagaatgccaggccccagtgggaggggcttggcctgcccctctctatccttggagccctgagggtttcctgcaaggtgtggccgctgcagaggggagggggacacctggccaggcctgcagcgccccctggcccagtggcccctgcagccctcagccgcctcaatcagtcatctccctaccctctgaacagctggtgcttccagggaaattacctaatgaatcaacaatgcagggattgtggaggcggaactgcagcaggaaggggcctttctcccatgctaggcccactaggcatgggacacctgcggggcagccgagccccctgcacccctcccccacgcagcgccctgcagaataaagaaagctggagtcagacagacacagggctgctgctaccagtccctgctttgctgtttgcccgctgtgtgtccttatgcaagtgtctttacctctctgggcttcaggtttctcgtctgtacaaatggggttaatatggtgccttgtactgggaggctgtgctgattaagagtagtggcccctgtgtggtgcttagcatgagcctggggcaagtgactgctcagtacctggtggtttaataataataatgattatcattactataccttctcaggagacattcatctgtgtatagttcccagtgatccttgtcagggaattccctttgagcctcaatttcctcggctgtaaagtgggaccaggatctgtttgcttgagggtagtggcagggactggttcctgcccctggagacctcctggctcccagcccagtctgggagagcagccctgagaattctgcagaaccagttccctggtctagccatgggaggctcccacgccctgccctcgggaggaaggaggcctgctcccagggtgggcacaggggcccagagaggtatgggtggaagtgtgggctgggctgggagccggtgggcggcctgttggagcaggccccaagctgggcacagagggcccattgttgctgggctcagccaggccaggcccacgagagcggccaccgctgccgggattcaagaagtgtctagacagggcagccccaggctctggcctaagcttcctccaggtggggctgtgccaccggggacatatagggagcctggtgccctcagctcaaatgggacctgacagacagaggagactggggcagaggcaggactacccgtcaggaagacagacaaacacaatccaaacacactgctggcaaggagggtggcgttggcagtggtggctcacttgggatctggagaggagcttggacctgggagtcagaaaactctgggttccagtcctggctctattgctgtgcaacccagggcaagcgaatgtccctctctgagccttgttgacctcagctgaacaacctaaggcttaagaattttgaggctggtgcagtggctcacacctgtaatcacagcactttgggaggttgaggcgggcggatcacttgaggtcaggagttcgagaccagcctgaccaacatggtgaaaccccatctctactaaaaatacaaagaattagccaggcatgatgcatgcctgtagtcccagctactcaggaggctgaggcaggagaatcacttaacccgggaggcagaggttgcagtgagccgagaacacaccactgcactccaacctaggcgacaaggcaagactctttctcaaaaaaaaaaaaaaagaaaaaaaaaagaattttgagagcagagggacttgggttcaaatcccagctctgccacttccacagttgtgtgaccttggcaaggaatttgacctctttgagcctcagttttctcatttataaaatgcggataatagtaacccttgtctctaaaatgagataaacacatacgatgtttggagtagtgcctggcgcctaatgactatgcagtaaacattaatgcctgcctccattgttatcaccatttcaatttgttttggttgataccaagcttgtggatcgcttgccaggcagtgtctggcacatagtcaacacacggtacttgagaatgcttttcccaagacgatgtgcttggcccttgccctctccttggccttggttgccctgcttgggaaatgggctcatcccagaccaggccacccatggggcggggcagcaggccaggctgtctttggggaatcccgggggcctctctgcctcccagtatggggctatttttagccaggtgggtagaagttgctgctcttatctctgcctggtatttttggcacatcttgactgccagggctcctctgccctcccacgccagctgcacccacggagcccaagtctgagtcctgtgccaggctcttgtctcccaaccccagcccaggggataccaggtggaggatgcctgtccagccagccctcgtctgcctccagccacctccaggccacccacagctggccccaggtctgaggctgtcgggggggtctcacatctgtaaaggggagccgcgccatactcccctcccccaacgctctgtgtcgtttccatggtggtgagcacaaatcccccagccctgcacagaggaaccttgtttgtttcgcctgcataacttggagaccaagtcacaggaccaggccccccaagttacccccgcagcgcagcccagcccaatcccccacccaaacagacagccccagggatgggggggaggcagttataccccttccccttgaaccaggccaaggggccctgtgggcaaggagccaagaggtgtcacctccaagtcccttccctgctgggagtctcacttcccttgtctgtagaatgggaacatgtcacagagatagcgcatggcccgtactaggtacttaataaatgcacaagttggctgggcgcggtggctcacgcttgtaatcccagcactttgggaggctgaggtgggcagatcaccaggtcaggagtgcaagaccagcctgaccaacatggtgaaaccccgtcgatactaaaaaatacaaaaattagctgggtgtggtggtgcgcgcctgtaatcccacctacttaggaggctgaggcaggagaatcgcttgaacctgggaggcggaggttgcagtgagccaagatcacgccatcgcagtccagcctgggcaacagagagactccgtctggaaaaaaataaataaatgcacacgttgtgcaagtatttcctgaccttgaccaaagtaattcagcttcctgagcctcagtttctctacctacgaagttgggatgaaggtatctctctcattggagaggctgaagcattaaacacagggatgcctgtaccgtccttagcgctgtgcttgcgttgggcaagtgtccattcaggaattgcttgtcttcttcctgccaatgctgctgttcttgttagttttattattattatccccaggtggaggtggggtgttcctccatgccttcgcgcctctctggcttcctccagctccctggagctagctgctggctgagccggtccccctcctccacggtccatcgtaacctgatttggggggaggggcggtgcagcctggcacggccattgttgggcctccccctggagccagggctggggcggcgggggcggggctgccagctgtgcagtgacattccgcagccctgctaaccgctgctcctgactctggtggctaaattgagtctcggtttccttaaaatgactatttattgctttaatgcagtattgagtatttactgagtgttggagaaaaggctcgcccagtttggagcttggcggccaccggccagcggggctgctctgggagggtgagtctggaggaggcgggaggctcctcttaccagagaaacaaaagcgcctccggtgttccttctgctgggctgcaggggcggggttgccctgtctctgatctggaccactccttcccctgggtggtgtgtctttggaaggaggggttcacaggacagccttccacccgcttcaccagccgtggagaatcgctggcctttgaacagagtaggcaccagctgccccctaccaaccccccgggtagcccgctacctcggtggggccagcccatgccagcccggggcagctcagctgtgtccctctgcatggagacctcctcacagccccaacaaggccagcgtgggccctccccgagggctacaccattgtctccagggtgaatgcaaacgctgaccagaacccagcaggcagcatgtgcggagaggctgagatgtgctggtgaacaaagatcggaggaggaggcctctcatcacagctcctacgcagaggttcccgagctaggcgctgtgccgaggcggtctgccctgcgcctcagtaaccctcagaacaacctaccaggcagcttctatggccggcctattttacagatgggaaaactgaggtttgagagatttgctgagaggcacagacgggtctgaacgcagctctggtgctctgctcaccacctcctggggggcagcccactggaagatgctgggagcaggcaggctccctgaaggaagtgcccatcgaatccagcctggaaggatgaaaagcattcagctgacagccctggaggggcagggggcaggcccaggagaggggacagggagagccaaggcacggagttgaggccacggacctcagagtccagagcagctgagccaggtgacagaggctgatgggattagggagagcctgccctggtgtggctggagctgcagatccatttctggaaagaggaaagggaagcaggaagggagaaagagggtggaaaagtaagtgagggcaaagaaaggaaattgagggcaaaaggaagaagggaagtgagaaaaacaggttgttaatagcaatgctaataataacctcactggcgccattctatgtgctttacgtacgtgctttacgtacgcatgttctatgtgctgtacgctgataacacactgggtagtcagggctgccctgtcctgttgcgtgtaagtggagagactctgaagacttctgagcaggccgtgatgcagtttgattttcattctgaaagagacaggagacagcagaggggacaaggaggcctgggcagggcaggtatacagggatgagggcctgcagaggggcggcgtgggaagaatgggagaggaagaggcctgggcgaagggttcgaggtttcttctctctcagccctgggagaacagtcatttccagaagagctggtcagagggaactgagcttagggcgaaatgacaaatcggtctcttttgttctctgtatttcttatagattttttattttttatattacaaaatcgttgttgctcattgtaaaataaattcaggcaaagcagaagtcaaacaaaatgggacagtattcatccgttccctcacccctttcccagaggcggtcagttgacagatgcgtaacgttccaggcctttcctacaacataggagcatgttctgtgcacatccacttggttttccttttgatgggatccatatttcctctaactgctctgctctgtactggcttgtcccacttagcaacacgctgagaacacctgcgcacatcagtacacgcagatttgctgtatcttgcagccacgacgtaacagtccagggaatgggtgaactttgatttatgaacccatttccctactgacagccctttgggcagctgccagtgctttgctgtcacacacaccatacatcagtgagcatcctggtacatatatctttgtgcgcatgtgccgcgtgacgggagctggagtataaacacactgggcggtgctgccttgggggcatccacagagcagcccaggaagcaggccagtaaaggggtctggatccccagagaggctgggagcttgagggaggggccggtgctatagatctggaggtggtggtttgagagcttttgacattaagtgacactcaaagccataagagaacaaaaaccctgagagtcctggcatttaagagcaggtggagaactaggaacccacaggtctctggggagagaccaagaccgtgtgccttcagagagtttccagaagaaagggatggccaaaggtggccagtggcagagggcagtgtgtgcttagttgtccagcccctggcacagtgcctgcccacagtagctgctcagtaagcaagggccagttaaatcaatcaatcaatgaacgagacactcgggtctggaaggtgttgtttgttttcagctgagtggtagcttagggaaagcggaggcagctgaaagcaggttgattgaggaagaaagtgcaggtgatgatgtggtcccactgggtgtggacagagcagggctggccagggaaggtgagaggggggcaggttgagggactgaaaggagctgagtgtcctggcaggttaggaaacggagggcagaagaagagctgctggggaagtactttggtgtttggggctcagggacagacactcttactgagaccaggggtctgcagagacctcagcattgcagggaaagatccctctggttggaaagggtggctgagtcaggctgtgtcacttcctgagcacagtcctggccactcagcgcttactgtctcatcacaccttcaccagaacgctgcagaggcagatcataacctcccattttatagacaaggaaattgaggctctggaggtggagtcatgggcccaaggtcacaaagctaagactttagctttacaaatacagaagcaggatttattattattattattattattattttgagatggagtctcgctctgtcgcccaggctgtagtgcagtggcaccatctcagctcactgaaacctctgtcttctgagttcaagcaattctcctgcctcagcctcctgagtagctgggattacaggcgtgcaccaccacacccagctaatttttgtatttttagtagagacagggtttcaccatgttggccgggctgttctccaactcctgacctcaggtgatccacccacctcagcctcccaaagtgctaggattacaggcatgagccaccgtgcctggcccagaagcagaatttaaatccacatctttcagaccccaaagaggccccactcacctcttgtccccctaaccccacatcccccaggccctcctgggtggtgcttggcaggggatgatagacaggcagggagaggggccttctggaacctggctctttgtatccacagttgggaaaagcatgccgcacttgccctttgttacgccttcaagaatgcttgactgggtgaggaaactgagtcatggccagactcgtttgctctttagaaatggacacggaagcagcagcaggcctggggtccaaccctgccaaggggctctctggcagcttgagccctgagcagtcctggaccccgagggcggaggacgaggggacgagaggaagattgtagctggcatgggcaggaaggtggaagggcattccatgcggcgagggtgcacctgagagggcatggactgcctggatggtgaggctgaaacaaggcctggccgcgaggagggtggagacagggatgagggctcctgtagatatgagaactcccggcggatgaggcctggggagagggaggggccaatctgtgagtcgggagccctggcctcgccactaaccagtctcagactgtgggtgggtcactgccctctctgcctgggcctccctggacttctgagaaaagtttccttcgggtctgcattgtgtatttgtatgagcgcatgtgtgtgtgttcacgtgtgtctgggtgtgtccctgggcacctgcagcctgcttgggcatccgtgtgggcctggggggtcttcgttttgacgcgtcttgtttgtccagcctctcacattcacgtgtgtgagtgtatacctgggcttttgtgctcctctgggtatgtctgtgcacactgtgtgtgaccccaggtgcctgtgtgtacgtctgtatatggcagtatgtttctctgtgcaagtaggtgccattctggtcacctcatgtgtgcacatgtgttaaggtatgtgtccatgggatgagggcttgggtcagttgtctctagggcagggcagaaaaggaggtcatcagagcccaaagttcctcaggatctgggcagtccgctcctctgcccttcccccaggatggcccccaggtactccccaggccatgaggcaggacaggaaccacagtggccatggttagaagtggagggggtaggagagaaatgaagccttccgaggaggctgagggcagggctcctgggtggaggattggtggacaactaggggtgaggtcacccaacagacagcgaggagacccccttcctggcaacttttccagaaacctggcactgggagggccctaacccaaatcccagttcccaagagagtcccggcgtgtgcctcaatctcccagaatataccagctgggcccccagagcagtcacctgatgctgggtctgagtgaccccctccaaggggcagagccctgaaacagcccccacagctgcctcccatggccagacatgtgcatacatgagtagaggcggcagacctccccacgggtggacacgtgtgcatgtgcatgtacaaatgcatcagcagttgtgcgtgcatgtaaatgtgtgagcacactcagagagcagcctgtagatagagttgtgtacgtacgcatccttggtgcgtatgagcatgcatgtgagtgtatgtggccagtatgtgtgcatatgggtgcagacgcgctcagatttgccggcatattgtgctggcatgtgtgggcatgtgtaaacagcagggttgggcagatgcagatggacaggtaggtgtgagtaggttgacacgcttgagtacacgtatgcacacattgtcaacatacacatatgtattgacaggcatgtgtgagtggacacgggtgagggcctagactgttggcacatgcaatacaggtatgcacacatatgtggtacctgggtgctgtgggtggcagtacagtcagtcctccctcaccctcttggataggttcttggaaactgtgacattaagcgaaaccacagacagcaggtcctcaaataacgtttccatgtaacacggacgaaaaaagtttatttcattatatggcgtttctcttaaagtcgcagttcccaagaacccatccacaagggtaagtgaagacttactgtgcgtgtcacaggtgaattatcatgggtgtgggtatagctgtgggtaggcatgaggattgggagcccagcacacacagacctcccacgctagctgccaccactgtggttgtctggaggggagtgcaggacagatacacagccaggggccatgccaggtggcagagaagggggcaagagaactatcagctgggacacctcccatactctccagagtttggcacccaggcacagccccatgcccagctcaccagccgttggcaggaattcaatcccaccccagtaaacccagctctgcttcgccaccgccgagctctgagctggggggaggggaccccgctcggaaatcggtcataaatttcttgagatgctttaattttttaaaagccccacgtagatgctttgcattgtgaaaacccacaaatatcagctaaatgaggtgcgccagcagaaggcccgccaggcccacagccctcccctcccagcagctgggcccgggctcagctggggcccctggcctggccagccagggccgaggggcccatctttgttccgagcagagctcagactgcagagtggctgggtaaatagtcgccgcagtaatcgcaggctgattccaactaattaaatcctgcgccaagagcccactccagccggtatcccgagaggccgcaaaaacacagacaccccagacggggcactgctccaggccggctctggctctctaatcctgtatcttttgaaagataggcgcaccccgggatgagaggtcagcgggcctgccctgtgccgagcggtggaatttttcaataaccagcagctgggtcaccaggcacacaaaggcagtgtaatatcctgtgggcttactcggggagagtgagcgagccagctccctccaggccagggcagcggccccccacagcccaggcccccagcggcccagaggccacttggccaggcctccactcccctccctccagaggggcagagagggaatagaggtcggcattctccaccacccccttctcctggactggggcttccaagtaaattcatcttccttattaaaaaccagccttgatgctcccgagccccagctgtggccgtgatgggacctgcctggggcagggctgctggggccgggctccttccaaggggtcagtggatgcttctcacatagggaggccacaccacaaggggtgaaggtctccagctctggagttggaaggaccgggttcaaatcccttgggcctgtctgctggaggccatcctggctggcccagtactggctggtgaccttgagcaaggcactcagtagtaccctctgtggaatgggatcatgagttacagttattagagggactgaatgagagccagtgtctggtagctccccctgccttagtttctcccacggaataatggagatcaggggcctccctcacaggctctaggtgaagcagggtttgtgcccatgcggggctcacacactgtagagagctgtccttggcgggacctgtgcagcacatgtgagagtgattagaagctgcagagactcagtttattttattttattttattttttttcccagagaaacaatagttgcccctctcccgagtctggaatgctttacgccctgggtctgggacccctcatttaaattggctgcgaagggacaggcactgtgagcctggaagggggttgttagggatggaaagccggggcccaggaatttacaatccgttacttgagggatgtcctgcctccctctcgccccattcaggccttctcagacccagcatgtgccgtaaagatgtcacatggggtgcggggggctgaggaacagtccagggcctggccttagggaggggggcgcacacagcccaggacagaatcctggctgcaccatgtcctggccagcggagcctggcaggagcttccctcccagaggcactggtaagcggaagcgttggcttttatcgcttgctggccccagtgatgccagaagtgaggccagtgacgtgcccaggcacatgacactggcacaggacttggtcagaacggtgcgcctctcgccgcccacctgtggactcctcgcccacacaaagcaagaggctcttttcggcttttgcccaaccacatgctgacctatctcttactgggggctctggcactttgtagctgtgaggcttggcacaaggctcagttttctcatctgagaaatgggaagactcattctccttgccttccagggtcgagaggagatgagaactccagaagctcgggccagagcctggctcacagcaggtatccatgctggggtctgggggagccccagacaccacagggagcccctacctagggaaagggcattgaggggacctgtcagagtgaatggggagccacccacagagggtagggagggctctgcgtgctgctggctggacttcctgggcgtctgacacaccaggccccacaaacaactccgcaccagggagctgggcagatctgagagccgcacaggaggccagtggggtcaagctcagggaccagtgtagaaagaggctaacccagggctccctcaggtagggcagaaggtagcttttggcaccatcagggaggtggagatggacaagggaacacagatttggggccaaacatgaggccacggggtttttgagggggtggttccccaggcacccagcttcaccaggtccccgggctctgagacactccacctccactctgggcagagagggggcatcgggggcatggctaggggccagcactgtgcttcctgggcgcctcacctcctccctgactcctggagactcccagcccctgtctgggagatgagcatttaggaatctgcttgtgcaggggtggtgggaggggccggggtggagggcgcatccccacggggagattggatggaaatggcctgccagtgtgtgtgtgagtgtgcgcctgtggcagcagcagagtaaacagccgctgccctgtcctctctgcggccgtggccaggtacacaggcctgtttggacagctgccttgtctgtccgtctgtttgggagatgctggctgatagatggggatgggcggactgttaacccctcgttgcctgcactgctatgtgcttcctgcctcatccatggggtagaaggtagccagaaggtggtcctggctgtgcccccagctcctctctaggggggaaacctctagttctgagtcagggacagagtgaggagggctccagggcatcaagagcttgctcctccccgcaccagggagccaaggacagaggagaagggggtcttccccagtggtgactaggggcagaatatgtctctgagtgagtgtctggagccctcctcaccccaacaccatgccctgtggaagctcctcttcctttattaaaaagttactgccaggctttctcagggctgctcttcttcaggaacgcctgctccacttgtagggtggggtggaggaggctgggggggcattcaggaacaccagcaacaggcccctgctaagtgtgaacaggcagagatggggcctggggccacctgtggggcagctaagctccatctgtctcctcttggtcatcagagagcctggtgtggggagatccctgacccaaagatgaacggatgctgtgctggcagtcagtgcagtgagccaggtgactgcctgcctggcatctccacgtggtcccccatctgccaccctgtgctcccatctcaggcagggctcccccatccacgtccaccaggcacctgacagggccgagggagccactccaggtttcccattcaaccccaaagcccctgtccacttcaggaactccctacatggctctctggtaacccaccccctctcccactccaggatcccagccaggacccgctgtgcctctcacctgcagggcaccagcctggaccctcttagcgagtctccccacaaatgatctttaaaaaatgtaaatcactcaagccactccctacttaaaacctttcaatgacttccccgtggctcttgagattaagacaaaaatcctttaaatggcccacaagaccgtcaacagggcatgggttaaataagttagggtttgccctgtaatagaggatcaggcagctgtaaaatcaggtgctgttgttccaacgtagagtcatctccagtcatggggtgggggtggcggttgtagagcatattagcgtttgtataaaaaagaaagtggaaaaaaatcccaatcagtcctcattaccaaaacaaaacaaaacccccccaaaatacacccaaaaccaggccgggaggggaatgacagatgcactcggcttggtgtatgtgggcttgtgtatgtgtgatacgtctctggaggagggtcaaatgaaagacctggattgcctctggggaggggaccgatggctaggcatggggtagaggaggatgcagagaacgcccttttgtatttgaacatttcagtattaaattatggaatgcattacctcttcaaaaacaaattcaataatttttaagataaaaaatgttggccgggtgcggtggctcacgcctgtaatcccagcactttgggaggccgaggcgggcggatcacaaggtcaagagatcaagaccatcctggccaacatggtgaaaccccgtctctattaaaagtacaaaaattagctgggcgtagtggcacacgcctgtaatcccagctactcaggaggctgaggcaggagaattgcttgaacccgggaggcagaggttgcggtgagccgggattgtgccactgcactccagcctggcgacagagcaagactccatctcaaaaaaaaaattaaaaaaaaaaaaaagataaaaaatgttcagtaggccgggcgcggtggctcacgcctgtaatcccagcactttgggaggccgaggcgggcggatcacgaggtcaggagatcgagaccatcctggctaacacggtgaaaccccgtctctactaaaaatacaaaaaattagccgggcgtggtagcgggcacctgtagtcccagctactcgggaggctgaggcaggagaatggcgtgaacccgggaggcggagcttgcagtgagccgagatcgcgccactgcactccagcctgggcgacagagcgagactccgtctcaaaaaaaaaaaaaaaaaatgttcagtagacagtgtgtaagaccctgcacactcaggcaggctcctgtactccccagcttcctcttgctccaggcacccgcccttccctcgcaaccctctgcaccttttatttctcattgattctccttgtttctcaggacctttgcacacagtgtttctctcctgcctggcctctccgtcacctcccatccttgcctggctgatcgccctcctctccccgtctcagcccaaatctctgtcttccgaaaagtggccttctctgacttgctccccaccacagtccccaggatgggctgtctcccagtggcttgttcgctgctgtccccagcacccagcaccgcacctggcacacaataagcaccgcatcagtatttgggggaatggatgaagtggcaggaagaggaggataccctgggaactccatgccatggggcttgggacgtgcccacctggcctttgaaggatgagaagcattttgccagactcacagcgggacagtattccaagtagagcatggacaaggtacagagaccaggtggctggctttctctagcaacctgtctgctaccccagttcttccatgaccaaactgggtgtattgaacaagttacctcccctctctgagcctcagtttgctcatcagcaaaatgggggtgttggcagagacctttcagacctttcggagttaccaggggtggggtccgcagatccccatagggaggacttgcgcacagttggcgctgggtaaatgctgggagaactgctgcgggcgaggggaaagggttaaagctaggcgctttttaattgtcaaatgactgcgggcgattagcactggcagcttcctcaataatcgctcttctctgtacctgctgggagcttaattaaaaaacaaagaggctcaatttaaaggccattactatgctaatgcggccgggcgggcggtgattaagcggctcaggcaggcagcgggcggctggggcggggcatggggcgatcagttacccactaaatgggcgggctgcgtgccctgcctgtcccgaaggccgagccctgacctgcctcgcctgccctttgcccgtccccagccagagcgcaggagacccagggatgtggtcccccagattctcttctccatccctgggagagggtccccatctctggcaggaaatgagtggcacccacactttcatatacctccttttaattcctgctcctgccccctcctctccgagctcccctgggctcagcatggagtcctgctcctctctggcacccccttctcaagatattctctcaggcctctgtagatgactcagccaggggactcatcttgcccacccactactgctatgtctccacaaaaagcccggcacaacaggtcactggctagaagcaggtatcaggctcccaaatctctgggtcatttgcttcccagtccccaactacctttccaacctccaggaaggcaggagagtgtggtggttaccagcccagctgacctggggccccagctctgcatttcaccagccgggtgacctgtgtaaggaagagactcctacctccggtagtggtcatgaggcatcagtgaggcccctgagtgtgaagctctgagcacagggctgaactggttcccgtgagtgtaacgtctagtaggagcgtctgccagcttcattcacagcctgcgttcaaacattcgagcaggagcacagggcatgtactcagggcattgcggggaggaggaagcttagtccagatctcaggaaagagactgggtagtaaggccctccatgactgggctaacaaagttggtgctatctctggctgcattaagaggagcataggatgggaaataagggaggagatggttggtcctccctctggaggagagagctaccatgcctcaaggtcttatatggacagactcaggctcattcagagggtgattagaatgtggagaaactgctgggcatggtggctcacgcctgtaatcccagcactttgggatgccaaggcaggtagatcacttgaggttgggagtttgagaccagcctggccaacatggtgaaaccccatctctacttaaaatacaaaaaattagctgggtggtggcccgcgcctgtaatcccagctactcgggaggctaagacaggagaatcgcttgaatccgggaggtggagcttgcagtgagccaagatcatgccattgcaccccagcctgggcgacagagcgagacttcgtctcaaaaaaaaaaaacaaaaaacaaaaaaaaaaaacaaaaagactgcggagaagctgccacaggagcctaaccaagaaagggaggtgtcactgtctttgagtgcctgaagggcaagaaggagctcacttagtctgtggggccccagctgaagctgggcatttgaacacaacatatgacacccccaaatctgtctcaaccccatgctttttaccctgagcatgtttttatcacctgcctggtaaaatttgtagtaataaactttggtaattttgttaacattgaaaaccacccatcctgatcctggggaaaatttagcttggtaaaataatccatacaaaatataactgacaacggtgacacgaccacagtaagatgtgtcactggccacaaattaaccaaagagtccatcagcaggatccaatacaggcaaaaacctgatgctagaggaaagctttatagaaaatttttcatgaaaaataattatctcaatgagaataattttagggaaataatggggaaagtagaaaattatttgactctactagaaagaaaattgatttaaaaaaatgctttaatggagtttgttccagaaaacacttgctcaaagaaagtttattagtgttgttacagccctaattaaaatgctatggtctatgtgcagcagtccaaaatccttaaagtcataatggtggggtcaaaatatcagctgggtcagccacttggacaccctagtggtaccctggagatctgacactccgctcgcatggaatacctgctctcccattctaccaggagccccctgaagactgtgaccctgctgattccccatcacctagcacagagcttagtcatggtggcttgctagtgcctacagaatagacaaatcatatagtgaaagtttcagccctttcaggaggaactgagtcactacatggcgtttggcacagaacaagtagctaagtatttgttggacggatggaggcatggatgtttgtatggatagctggtggagagggtggatgtagctaagtatttgtgagctggatggaggcatggatgtttgtatgggtagctggttgagagggtggatggaggggggatgggtaatatatgggtggtggatggatgggtaagtggaaggatagatgcatgcatgcgtggatgtttgtatgggtggatagatggttgaaggggtgggtggatgggggacaggtggatagatgggtaggcagatgggcagatgagtggatgtatgggtggatggatgcatggatggatgggtggataaatggatgattttatgagaaaaagagaggtacgacctatcctccttagcacaacacacaaggtgtccagcctgacctttctttctcgcccacactccaacctgaccactgtctccaacctgacccactatcttcctaaccctgaaaatggcctccattcccttcatgccattgtggtttttcaacttctccctcccagaatgggctctctgcttttccacctctacacagagcctgactctggcctcagacacacacattcccatcccagccccaacacttcccccattggaatcctctgaactctttgaagtctccagaaagtccttcctgccccaccactctgccctccacccggctaagtttgaatgtcttcagactgccgtggagcccccaccccttactgggcacctggctctgggcctggcctattctggccatgcagggccccggagagaaatccaaaggcctctgcctcccgtggcccggggtttctcaccttccacgtgcgttgtcagccctctggactgtgggcgccatcatccccccataaccctggtgcccccagcccaggccagaggcccagcagctccgtgctgatgaagcaagtgcagagttgttttgggaggtggccagggcagatgaggttaaagcaggaaagggcttcaagaacagggaggtccaggaaaccaagcacagagactgggaggatgagcaggagctgggaggcccagtgtgccaggctcaaaccccagctcagacactaagcagctgtgtaccctctgcaagcagcactttcctctctagcaaagagagtgatgttgcctacctcgcaggggtcttacagaggaggagtccatgggcaaataaagcccagagcttgctatgtgggcaacagtcaatacatcttagtaagcaataataatgataataatgaatgttggatttggcaaccaggagctgctgacctcagtgagaatgggggaaggtacctgggactagctcaaaaaggtacctgggactagctcagtttgatgagcaggtgggaggaggaggttcctactgcagaccaggagagggcctggctcatggtaggtgccgggtaaacgttagatgaatgggtgaatcaccaaatcatcaaatgtattgaattcactagtgaaggggcagaaagaagggggaagagggtgaactcaaaggtcatgaaatagtacaggtaaagcccttcgcacagtgcctggcacatcatagctcgcagcctccctgatgcccggttggtccaggatttcctgtggctcttctagcctggactagagtcccaagttcagccagaaacgatgcagggaaggatggtcagagggatgtgatgctccacctcctacctgcacctgacctgtctcgacaatggcaggagggctcctgcctgtcaccagggaaggtctggtccccacagaagcctcaatatccccaccacccatcggaagtcagagccccaaaggtgggaaaccagttgtcagatgccaagccacatggacacggctgctcaccctgtagcagtgtgtctgtgtaagtgtatctgtgtgattgtatctctgggtgtgtctccatcctggcagcatctccacacagcatctccagtctgtgcctctccctgaactccaacctcacacaagcagctgaccctggacctatctgtccacatggctgcctagaaggcagctcagacctaacacatccagggctgcactccctgttcttcccctgcctccccacagacgccatgtcctctagtggcaactccatcattccggatgctcagccaggagatctgggactcatccctgatgccgtcctttctcccacgtcctctcaggccctgtctgccttcacaaggcttcccctgccctcctggctctgagccaacaccttcactgtgctaacttcccaaagccactccctgctcctccctctaacccggtgccccccctacaggtgcctaaggaacctggttaaaatgccaatcagaggcggacacagtggctcacacctgtaattccaacactttgggaggctgaggtgggtggataatttgaggttaggagttcgtgaccagcctggccaacatagtgaaaccccatctgtactgaaaatacaaaaattagccgagtgtggtggcggatgcctgtaatcccagctacttgggaggctgaggcaggagaattgcttgaacccgggaggcagaggttgcagtgagccaagatcacgccactgcactccagcctgggcgacagagtgagactccatctcaaaaaaaaaaaataataataataaaataaaatgccaatcagatcacacccccccacccttcccagggtccctatctcatgtgatctgtcccctttgccccccagctctacctgcaccttgtccccatcactcatctgctccagccacaccccagatacttgcagatacttggtccccagggtctttttttttttttttttttttttttatagagatgggctttggccattttgcccaggctgatctcaaactcctgggctcaagcaatctacaagcctcggccttccaaaatgctgggattacaggggtcagccacagagcccagcctccccagggcctttgcactggctcctccctctgcaaggagccacttcccccgatattgtagataccatcccccaggtgtcggctggaatgtgtgtctcattcatgcctctgactgtcccttctaaagctgcagccccatctctcttccctgtcttcactcttctttgccttgtagtcaccattcgtcatactctgtatgaaatggatttatctacgtgttaaaatagatcagtgttactgtccttccgcctatgagaatgtcctccacgggtaagaaggaactgggggtgggggcattgggaggggctgtctctcttctcactgctctagccccgcctccagacagcgccggcccgcacatagtagacgctaaagaaatatttgtggggccgtgtgcggtggctcacgcctgtaatcccaacgctttgagagccctaggtggggggatcacgaggtcaggagatcgagaccagcctggctaacatggtgaaaccccatctctactaaaaatacaaatattagccgggcgcggtggcgcctgcctgtagtcccagctactcgggagggtaaggtaggagaatcgcttgaacccaggaggcggaggttgcaatgagctgagatcacgccactgcactccagcctgggtgacagagaggcactctgtctgaaaaaaaaaaaaaaaaaaaaagaaagaaagaaatatttgtggaatcgccaaatgtgcatgtgggcctccctggccaggctggcctgggatggctccccgggctcccggctgtgcccgtccctccctgtccctggcccgtgacctccagccccggctgggggctcccgacagcgcccctggcgcggatcaaagggccgaggggccggcggccccgcacagctgcgggccgcaggaagcgcaggggcagccctcgctgcaggcccggccccgacgcggcgaggaggccgggggaggccgggaggctgggagaggccccgcgaggcccgcagagcgcgcccgtctcgccgcgcattccagccgcgtgattgacgcgcgtaccggggcccccgcccgcggctcccgccgccgcccgcccggcccgcggccgccgcatcaaagcagatgtttgcagctggtttgagttggatccccatcaacaggcccttttttgtctcaaaataaaaaacagctacgcccggaatgataaggacgcggcaggcacgtgggggagatgtcagcgagtccggcagggaggaggccgggcggctccctctctaagtgacaggctgactctagcagcagcagccgtgacccccagagtgtctagggtcctgtcgcctagctcctgtgaactgcagctcatccttcagccggcatcatcagagccccgtcccgcccacaaccataacctcagccaccacactgagcgcttactgtccgacatgctctacagcctgccatcctgggcacctcgccaccagcctagggaggaggtgtgacacaggaaggtcaatacattatgatgattacccataaggtgggaattggggtcaccagttttcaaatgggaaaaccagttcagagagcggagagggcttgtcccaagtcaggcagctaggaagtggcagagccgggatttaaatccattccttctgctccagaaccgggttcttaggtatgtgttatgtcaccttttccaagaagtccccagatagactcttggtgctttctgtgcctctctgcttgcccagcatgccccagtaccccatccaagcacgtgtcctacgggatgagattctaactccatgccccaagtccatgagcccagcccagagtcagcctccatgggtgtttgctgggtgaatgtgagagggtgtagccggtgggaacagaagggctgcagtgcaagggccaaatctcatggtccccatggagggaggaaggtgtttccagcagtggttgctgctgggaccgtgggcttgggcatggagaggccctaaaggaaaccagcctagaatctgcctggtccccagtgcggggcatacctataaagggacagacagacagacagggagagcacagacccaacagtgcaattacggggcttcagacaaaaaagggaggtggggaagagaaagttccagagacagactggggaggagaagagagcacacacctattaagatccctcctgtgccagacgctgggccatgccttcccacactggttaaaatcaccagattctcaattaccagggagggacaggtcaaacccccatttgacagaacaggaatctgaggcttggagaagggatgtgaatcacccgaggctgtgcatcacccgaggctgtgcagctggtgatggaggtgtggcagccacacctgaagatggagtaggggctgacagagctcttgagtgtgcaggggaaggaagggacacaggacagagggtctggttggctccccttgagtcagatgtccaggcctggtccaatcacttccagtcacaagagtcacttagtacaaacatggtaccccccgtggtctttcccttggtacaggggatgagggtgcttttggggtgggggactcccagccctgcaggaggcatgcgtggaactccactgatacaaattcaacaaaccggacccaagttgtgttgttgtgaaggggctgggggcaggagggcaagttcacttaccttgttacctggtggcagtttcagacccctaggagcagaatacctggtgtttttttgtgctagctggctgcccatttagtttcacacatggttgttcattcatttgacaaacactaaccacctcctccatgccagtaaattagacccagtatctgatttctgggttggtagggacttcagacgcacaaataactggagagtggctgggattctggctatcagggaaggcttcacagaggaggtgacacttgaattgggtcttcaaggatgaagaggagtttagcaagatgcaaaggaagggggcagagaagccaggccttggaagcagatggaattttaagcactaaggaggcaagaagggacttgctatgttcagggagtagtgagaagcctggccgagagagctgggtgtcacggggtgggtggggccttgagtgccacagcgaggtctttgggcttatcctgacattttggggtactcttggacgttcagaaatgaagaggtttgtaatctaacttcatgaggaggcaagaccaaactttgggtgtctctctcccaaccttctgctttctctctgaagtggtaggtagcagtgtcctggacaaaggctgggagttgccctaagctgtggcggaggggctggacagggttgccttgaggagtggaagaggtctactgagagtagagagacctgagtggagtgtgaagtgtgaattgttctgagaactcaaggaagagccacataaactgtaaagggcagtgacggggtgtgggaatggcaccctcagaggagggtaggagatcttgactcagcaagggtagtaagcggagagttagggtggtaagtcctggagagttgataacagtgatcatgatcaccgtttattgagcccagccctgtaaggcagcctctgtcatcatccccattggacagatgtggacagaggctcaagagaagggacttgtgcaagattccagtgctaggaagtgatagggctgggattccaagcccggtgcatgcagtctggaccttaagatctgggcatgaagacctgcttggagaagctggagtgctcccaggacattaggaagccaatgttactggaggtgaaagaatcagccataccctgtgtgtctctgcagctgccagtgatttaagtcgagaccatcctggctaacacggtgaaaccccgtctctactaaaaaatacaaaaaattagccgggcgtggtggcgggtgcctatagtcccagctactcgggaggctgaggcaggagaacagcgtgaacccaggaggcggagcttgcagtgagccgagatcataccactgcactccagcctgggcaacagagtgagactccatctcaaaaaaaaaaaaaaaaagaaattaatcagattagtaatccatgttcaaatgctcctgaaaaaattggctttcagagttttgtttattagccttatgagtttaataaattgagcattaaacaaataaacccgtaaaaactcagaggatatggagatatcttctcacagcctgggactcttcaaaggagggacatccctgaaaatggaatttcttactccataatatcagatgatcccctggaggggaaaaatgtgtttggaggtaggggagatgtgtatggccacccccaccttctggaggccgggctgatgctgagtaataagaacttgaggtgaatcgggccccaagtctcaggaagagacagacatgggcatggtgcccagggcccagggtaagggcagcttatgagcaaaggcacatggagatgcacagagcagggagggagtatctggagtatctggtgatgctgccgtgtgaccttaaaagagtgacctggcctctgcacctttctgtgctcatctgtaaaatgggaatggaaacagcatcttcctttgagggttctgtgaggattgaatgaggtgatgcaggcagctgataactgagcattattagtcctcagtaatgttctgagactgataacggagccaggagtgctctgtccagatcaggccaaacaagctagaagggctggccggaacccggggtggtggtgagaaggaggcacagtggggccctgtaaacccagtcagcgtcagggaggctgcccccaggaatcatggagactctagcaagggtgagcaacaaaggcgttttgggcacacaccgaacaaaagaaatgtggggtacctggagtaccttcttcatgccagcatggtgccgagggctttaaatgcatccagcccctgccaacaaccccatggtcggggatgatcattccctttttttttttattttttatatattttttgagacggagtctctctctgtcgcccaggctggagtgcagtggtgcggtcttggctcaccacaatctccacctcccaggttcaagtgattctcttgcctcaacctccggagtagctaggattacaggtgtgtgccaccatacccggctaattttttgtatttttagtagagacggggtttcaccatgttggccaggctggttttgaactcctaaccttaagtgatccgcccgcctcagcctcccaaagtgctgggatcacaggcgtgagccaccgcgctggcctgatcattcccattttatagatgaagaatttgaggttcagagaggtcaaatgccttgcctaaagctgcacagcaaggaagttatggaggttgtgcccgccacacctgctgctttacactgacaactcgctacatcttcatgctgagatgcaggcagtgttgtccagcccattgtatagataagtgagctgaggctcgagaagaaaaattacttgcccggtcaccagctagcaagtggtgggacaaggcatggaactcaagtccatgtgattccaatgccacctgtctgtggctgggccttcttctcagtggctggctccatagtcctccgtggtgggaggcacgaagagagggggaatgggggctcacagagaagagggaaccccgctggtatccccaacccctcccatacacgccattagtcgctctcaccccagcacagtagacaaaggcagccccataattgggagtgagtatttcatgcatcccccccgatgttttattgggtggagagatgcttggagaccaaacggatggcgcattctgtttataaagtgcgcgcagtttgttttatttcctgagtttttgcaatctagataacagatgataccctgagtggctggcgctgcctctgtaatggcggcactgagcctttggagaagtattaataatagattgtgttgatgagtttggagaaagtagcaatcgaccccctgctgccaaggcattagcgcggctgttctgagcacagccagcactgtggctttgactgcaaatgcaggtcacccgccctgctgccccttccccagcctaagaaggtttcctctccgggagtcacccaaggtgtgctgaccctggcctgggaccctgggaccgtggcgctcccacgctagcagcgacacggccagtgtctgtccactcagaggccgcagaggtcaggctgcagaccttagtgtggccactaggtcaggtggagtgtggggaggggacagaggggcagtaggggttgggggaggaccaccctccatgtcagagcaccgggttctacaaacccaggctccttcctcagcccctcgggagagctggacagccagccagattcctagggcctctgcctaaagctgtcactgacagttgggtaggttgtgccctgaacaaggggattcagccagagggccaaattagagccaaaatccagcccacattccccttgcagagccatgccctgcaggctggtggggtccagcatgcccagagcagagcctggcctcagcctcagctcaccccaggcctttactcacctactctgtaaacactcacggaggcccccttgaggatcagatggggccaggtcctgtctcatggaaccctggtagaggtggtagagttgggcaccaacagggacatgcattgtcattctgctgtgatacccgtgtactgagttacatgctcagcatcctcgaatcctgacaacagccttcaggaagggcttgacatctccattttacaggagtaaactgaggtgggggacgctgaggggagcatagaggaggctacctcccccagactggggcatcagagaaggcttcccagaggaggtggcattggagttgggcattgcaggatgagtaggagcctgctgggtagaatagaggtgggtggcaggggttgctgggggtgccccctgctgagtgctctggccagtgcccaggcagcatgcagagctccaagtggccctgcccacttcgccccaccagctcgccgtgggcggttctgacggcagctccaggaagggaggcaggcgagtgcctcccatttatggccatttctgttccagaaccgattagtagagaattgcagctgtaatctgtgcccgtgatggtgggccataaagagggatgggatgtgcacagcgctcccaaggtggcgcccgcagacatggcccggggacgccgggaatgaaaaatggttttaattccctcccagcagcaataatttgattcttcataaatttttccatcaaagtgttgttgagctgagttcccacagagcaggacacgtgacagggtgggggagtgtcgggaggagcggtcagcagacacagcagaggaggggccgtgctgcccagccctcctgctagtgctgaccagggcccggagaccacctctcccggccctcgtttgtctgcagagatgatgggagatgggagatggaatcacgttgtcatgtggaagctggattaggcccagcctgggagttgcctccagcatttactacccatgcgaccctgagcaagcaactctgcctcttagcacctcaatttcctcatctctaaaatggggttaatgttcattcttttcttgcagggttgttgcaaggattaaatgcgtctctgcatataagatgcttagagcagggctggcactctatacgtgctcagtgaatatctgttcgtgatggagatgcgtaagctgagacggagggatgggaaggtgttagccaagccaaaggacagagaaagatgggtcgaaagatggctgccatgatagtgctctggagaaactgcaggctgttctttggggctgcagcctggggaagcagagggtagaaagggaagaggcgggatcatgaagggccttgagtgccagcctcaggagctcggatggtctcctaagggcactagggagccatggaagagtctggagcagggaagcagcttgatccgatttgtattttagaaagatccccctggctcctgtgtgtgtgacggttcctgtgtgggctggggtttgaaggattgaaggggccaggagcccagagaggggaccaggcagttgctcgggcaggagaggaggggcccaggctgggcagtgggttgggcagggctgggaattgcttggatgtgttggtgagggaggatcagaggagaggcagaccagggagctgaggtagaaaggatcctttccagccaggggctgacctggcccccaaggaaagtttgagtggaccctccacactgccctcttgtggccaccgtgtctctgagctggaagggccctgagctgccacgcccgggacaggtgactctaggcaggatgccagcacccaccccagggccactgggggcctgtaggcagaagaatagggctgcagggcccttctgctgtctgacctggtgcccaaggagggcctctccctcccacctgggcctgagggtcagggtggcaagagggagaggccctcggcaggagtggcctctgggagggacttctgagcaccgccaacacgcccgctttgtgcatccgcaggctcttcgcggccaagtgcagcggctgcatggagaagatcgcccccaccgagttcgtgatgcgggcgctggagtgcgtgtaccacctgggctgcttctgctgctgcgtgtgtgaacggcagctacgcaagggcgacgaattcgtgctcaaggagggccagctgctgtgcaagggtgactacgagaaggagaaggacctgctcagctccgtgagccccgacgagtccgactccggtgaggcctggcctgagctgggggcaggcctcagggacgggggttgctggggtgtcctggaggggagtcccggctggagaagccacctcctgcttccaggacctgagctgcacacagatggtacatgcatatccagatgcacacgcgcactgacgtgtccacctgtgtgcacatgatacgaacatgcatccccccaggcacactacccctgagacctacgcatccatacatataaacatatgtgtgatcacatgtgtgcacacaagcacataaaatgcatgcaggaatacccctaccctgagtatggatacatgtacatgtatgtggagatatgtgttcacatacccgggaattcaaaagccacacccaggtccacacacacaagtgtacacacttaagcatacatacacatacacacatgacacagcacacttgtgcactaaacaccggtccacatggctgcacatatatgtttgtccacatgctcacatgtactgtggattgtgcttgtgtgcacacacacacctcttgttctctggcccaccccccttaccctctctgccttgatggccccccaccaacccgcagcccagctccacaggggtcttcaccagcacccagtccacaggctggggatgcctgagaggcagggagatgatgtgccttccccttctcagccccctggagccttcagcagtgagaagcaaacagcctcgagccagcctctgtttcccagccgaagggagggggctgggccctctgtgctggagggaaagaccccatttcccagggtgaaggaccctccctcctctgctctagcccccaaaaggacgaggccaatttgaaggcctcctggcagacagggcaagcccagccaggagtgagccttaaggagggaaagcccaggaggtggctttggtccttgttcttcctgggaacagtggggaaggactggagcaggaggcatggagaggaggtgtcccggtctgccaggccccatgggtaacctggagccctccggcaacaggatctgccacatgggaagggttttccatggccagggcctgcgtggaggcagtgagcccaccaccatctgtccctacccatccctgggcagggcactgctgcagccagctccatggcttccagctgcctggactcctgaggaagagcagaggctggccagccccagcagagggggtctcagtgggaggagatcacccgcctcatactccaagaacaggattgaagaaaggagaccagcctggggggcagcgggaggcccagtggtggctggggaggcttggccatccatctggggctgctggcatttctgagacccaaacctggggcggggaagtgccatgtgtgcatggtgggtgtggctgtagcactgggagaatgcacatgcttccgcacgctgtgtgtgtctgtccagatgcatgcatgcctgtacgttcctgcccgtgagcatgggcccatgtgtgtgaatacgcctgtgagttgcacgcgtgagggcctttgtgagcccacgtgtatgtggcagcaggtgagtgtgcatcttacgagtgtgtgcgtgcatacgctgtggtcagaagcactcttgtgtgaatatctgtggtgtgtgtctttgcttgcacactttcgtgtatgtccacacagccatgtgcacaaccgtgcgtgcacctgtctgcctgttccccgagtgggcctgccttcctgaaagtgtgtgcagccacatgtacgtgtgtgcatgcctgtgctgtggttgtccgaggcgcacctgtgtgagttcctgtgcaggtgtgccctgcggcccaggatgagggagtgaggcgtgtgtgccggggaagggactcgcagggtacagcaggcaggagaccagggcccagatgaggtagggcctgtgggccacgggagggaaggagatcttatcctgggccactggggagccacggcaggtgtcaacagaggggacaggctcccatcgggcagcaggttgccgaaggggacaaggctgaggcctgggctgcccccgccccttcatcacaggccgggttgtgtcccccacagtgaagagcgaggatgaagatggggacatgaagccggccaaggggcagggcagtcagagcaagggcagcggggatgacgggaaggacccgcggaggcccaagcgaccccggaccatcctcaccacgcagcagcgaagagccttcaaggcctccttcgaggtctcgtcgaagccttgccgaaaggtgaggggcggccggggggcggggctcaggctgatgcccgcacacccactgcctttctggagaccaccccctgctcctgctgggggtagggacatccctccatcctccatctctccgcacatcccatcatacccctaaacccaccatctccccgttgctgcccctggagggcctgacctgttcccctctctctgagccaggtccgagagacactggcagctgagacgggcctcagtgtgcgcgtggtccaggtctggtttcagaaccaaagagcaaaggtaagaggccaccccccatccccactggccccgggtagggtgggactagagggggcagccagaagactacggtccagggggcgtggggctggctgtgcctgggggcgaggggcagcaccggcctgaactgcgctctccctgcagatgaagaagctggcgcggcggcaccagcagcagcaggagcagcagaactcccagcggctgggccagggtgagccggggccggggcagggcctgggccagggtgagctggggccggggccaggggtgggcctaggccagggtgagctggggcagaggctggggctgggtgagcctgggccagggctgggaccggggctgcacctgtcccagggctagggacaaaggggcccgggatgtttcttttaacaaaacttctcaaaagccttccaccaaggccatcagatcccagggaacttctgctttaaaaccactgagacagagaaatagagaagccatggggactaggggacccagggaggagagatggcagagtggctgcctggagggttggcagaatttctgcaatcagaacagcaacagtctactcacactcactgcgtgcagacacgggtctcagccttcagcacaccccatctcaccctgtcctcataaatcactgcaagggggggtattgccatgtcccatttcacagatgaggaaactgagggactgcctgggatccctcagccagtaaggcaaagctggacctcagccccaagcctggagctcaagcctgtacctttaacaggatgacactaccccactgccggaattctgcagacaaagcttgtcagggcgtgaagggcctggggagtcgggagggactagctgcaggggcatgagtcaggccccctcatcactgggctttaccaaaaatcgtgtttccacatcagaatcttgagccagggctggtctcctgggccttcaaagccatgagggaggagcagggagctccctgggactgctgaagcaggcgggggacagagctgcctgcgccctggtgagagggaggcttctgggcaggtgccagggcaccaatgggcagataccagggcactgggggccaggccagtgtcccaggctggacttggcttctaatgacacagccttagtgcctgctgcttcctcgcttccccctctgcccctcctggggctgcagtcactgcctctggtctcccagccatgtcctgggctatgtctcacccctcagtgttcctagctgcttcctggacacagcctccctgagaaggtcccacagtccccccagctcatcccaacccatgccgtatgctccatcctgcccacacgcacatggcatgccctgctcctccccacccttctctgcaaatggcaccaccatccgccctgtccgagccaggaaccaggagtcacctctgaccttccccatcccacactgctgatccactgaggtgccaagttggggagtgaagtcttctcatgtctctcgcaccctcctaggagctgtctctcccacagccaccttgacagagaccccacccttcctctggcttcctcacccactggccccagcctcggtctcctcctccagcctttctcaccctcgtctaccaaaccctccagcggctcccagcggcctcggggacccccacccagctcggcaccccagggctccccatgacctgtggtccctctcagctggtctcccccacaccgacctctctccctgcctcttggccccacgtgctgcaccctcacttacccggcggtctgtctcctccatgcctttgccgcccctcagcctggcttgcctcccctgctctggcctgttgagcccctgctagttctttaagtcacatcagggcgggggccctttcctccaggaagtcttcccggggcctttttggcctgggtctgggaccttggtgctcccagatgcagcgcagaatcactattgcctgtgtggggtctgccgcctccctggatcccctggaggggcggggtggtgggaggaaagaagatgaggaggggaggactctggcttttggtaagctgagcctggaggaggagctggagtgtgcacctggggaaggggctggggagtcagtgtctggacagcttcagccagagtggggtgcctggggagtcccaaggagatcagaaggggaggctgctggggtgtagctgggagggcgtggaccaggccagggggtgaaggctcactgtgcccccagaggtcctgtccagccgcatggagggcatgatggcttcctacacgccgctggccccaccacagcagcagatcgtggccatggaacagagcccctacggcagcagcgaccccttccagcagggcctcacgccgccccaaatgccaggtgaccacatgaacccctatggtaagccgccctacccccacccgcccgccccagcacagcccctgccccctgccaggccaggcaggcctggggccaggacagccacctgctgccctagggctcaggcagcatggccagcacagccctcctgcccctgctgacaggaagggccccagtccttcttggccggcactagtcagcaggccatcctgtctctccctggcctccagtcacacagcctacagggcaaacagggggcccccaggagccccagcctgtaccccggtcctgacaccccttctgccccccagggaacgactccatcttccatgacatcgacagcgatacctccttaaccagcctcagcgactgcttcctcggctcctcagacgtgggctccctgcaggcccgcgtggggaaccccatcgaccggctctactccatgcagagttcctacttcgcctcctgagagccagccaggcgcacggacgcttgggcaggggcctgggggggactgccagcctctgcggccagcctggccacccccgccctgctctccgcacagactacagacagccatacggtgccctcccctcggccagctgggcctgaccactgtgcccgttgggtacagccagaccggtagatgggcacagcctgggcaggggctgtgtcctgcccacagagaccttgtcatccccagggacccagagctctcggacggccactcgcctcccagccccacctcggcctccatcgcctcctccccatctcttttttgggaagcttaaattctctctatttttttaaatgtcctctctgtgtccatggccctccatgcaagccccaggacaatggtgtcatgaggcggtgacctgagaagcgtgtgtacctgtgccccagcaagggcaggggtggcctctgggggcaggcccactgcctggaaccgcacacccctcagcctgagtctggagcagcagtggagaggggcctgaggggaggcactgtcaggaggcgggctcggagcctgagcctgggcaggcgcaaagggacagagaggcacgtgcagacacatgcacacttgcagacaaacccacgcaaacacacacacagctgtatggggacaccagaagggacagggatgctcagcgggtctgtcctgccttgtcagaaagagaaaaggaggccaggcaggggaccccccagttcttaagagcgattggaaagggaggaaggggagaggaagaggcgaacttgaagcatcggacccagttgtatcccagcctgggcccaaatgggggcagcctgggcagggagggcagccccaggccccaccaactctagaggcagatggagcccccagaaccaggtagcatcagaccagacaacagagcctccaggggtcagggacttcagaagcacctgctgggcaccccatctgcaatgtggtcctctccccagccacctctgcctcccctcacatacctccagtgacaaggagctcactaggtcagcgagcccacagcagctgtgctgtcctgcatcccagagccaggcttccccagctctccctcttaacactgtcccccagcaggcctccggctgtccctctaaaggtgtggggcaggtatcacttcaccttcccactgatgtcagccggccagaagtgagcaggcacatcacctctcctgctgtggcacccttcctctgttaatttggcccaaaagacaatgatttggccacatgaccttagagattcaccctgccctgctgtagctaaatccctgggccccacacgcaagtgacagctaagccacatctgttttctgtgtatatgcaggatgggggcacctactgttttgttttgttttgttttgttttgttttgttttgttttgttttgttttgtttgagacggagtttcgctcttgttgcccaggctggagtgcaatggcgcgatctcggctcaccacaacctccgcctcccaggttcaagtgattctgatgcctcagcctccctagtagctgagattacaggcatgcgccaccacacccagctaattttgtatttttagtagcaacggggtttctccatgttggtcaggctggtctccaacccccgacctcaggtgatccgcctgcctcggcctcccaaagtgctgggattacaggcgtgagccaccgcacccagtctgcacttactgtttagactgaatgagggaccgtgacctctttccttttccattccttcttactcgattcattccagcctgtggaatttctctgcaccctgattcagtgaccactgctctcctctctcccagcacatctgcccagtgaggagttggccctgggtctcacctgaggtgtgtggaccgggctggcctctccctgtttgacattggcccattaatgcatcctctttgggggacacattccaattgcatttcctgcccccttctcccagggcaattgcagaagattgtgtcaggcgccctgctggaagtcaggtgcactagatccatccccagccccagtctgctcaactctatccctgtcagagcaaggaggctgggctgctggggcctgactggtgagcccaccctgtcccctggtgatcactgtgtccccttgttcaggtgctcacaaccctacctttaactctgaggtcaagccctaggccaccaccctaaagtctgcctggtccaacctttgagcaagtaaggataatgaatgtcccttttccacctttggggccctctgcctggatctctggaatcctctaagttcaacctgttctgtggttttgctcccgtttgctgggaaattcagtccccccagaatgtcctgggccaacctccttgcctgacatgtggcctcgtgtcacccattgggccccagcagccagctagcccttctgcagctcttcttacaaacagagcctctccaaggacctcagttgatgttctggtccttctgccgcctcagcccaccagggtccgtgccaccatgggtctcttgagcagcagctgcactggcttctggagagacacccctctttctccttttgcacatgcaccatctgaatcgtgccagggacatcctgggcagattcaggggcagatgccctatcccccaggagacctggcccttctctctcagacccaataagttggaagggacgtcagaagcggtcatctcatctgccccttattttatagttggaaaccctgaggcaagagagggaaagaggcctgtccaaggtccgggttagtgacagagctgagctgagaacagggacgttgtgccccactgtcccctgtggtttgtgaatgacctccaggtcagggggtcacaacttgttcttagtaaacttgccagctgttggggtcacatattcccattctggggcctcacaaacccccgaatccagccgggaccccatgccaggagctggtctagggacagcatgcttgtgacccacagactgttaaagccagaagggacctcagagagtcccttatgctggaggcgccctgtcagccgtggctaggggccccttgctctatgctgtgccttgctgcccacaggctcccagacaccagtgcccactctgcccagccccggactgggtgtggctcgcagatgaacaagatgcagggcctgccttgaggggtgtctcctagaaggaaagccagactctccggcccagccagagagtccagacatggcagggacccgtttctcagatgaggagcctgaggctcagagaagggaggcgatgtgttcagggccacccagcagaagcctgtggggctgggcaaccttctcccactttatgggaggagctgcagccttggctgggagctgggcggggagtagccaggaccaccccttgcccgtgccgtgacatggaaccttcatcactaagggggctggagtgggaagagggagataactgtgtggtctccagagcaaaagagaatgagaggtgggcagggggagtcttggcaaaagaccaagttccacttccctgctggggaagtcaaggctcagaaagaggaaataattgccccaggtaacacagggcagaggagggacaaaaagctgggcatggccccagccagagcctcatctgcctactccgtgaagcctcccaggtactctgctatcctgggaaacgcacagggaggccacacagagacactgctcacaagagtcagaccaaggtgccagcacagcctggaaagagctcagaaagggggttggtgcacgtggctgggcatcttaggaggcttcctgagggtgggtaaaggtgggaaggccctggcgctgcatcagatgagcagggcctggcagggacaagcctcttctcctttgggaagccctgcagcctcctagcaagaggctgattccccactctgcccccatctgaatgtccttttcatgttgcacgcagggaacctcaggaaggaggattgcctgatgcctgcctggctccatccttgagctctgggcaccacctagggtgagggagagcctgcagctctggggctaagtctgccctggggggaaagggctccacgctcacacgcacgcgctcgcacacacacactcacacctggacgcacacggaggcttgcggacccatactcacaggcacatgtggcctggggactgggggagcaggaaagacccctccaacatttggcccttggaaggcaccattgccaatgagcctctttgctggttcccccgaccccacctgggggtcccatgggagcccagcccagccaggtgtggggatgggccaccggccattcctgttttccttgtacagacagattctcactacccacccgccatccccagacacattttatttaataacttgtcattgttaaattatttattagcgtttaccacaccaccacccccaccctgccctccactctcaccttccacctcttcccacaacagcagaaaatggaaacaacaacaaaaaaagatgagacatcagtatatttgtaaataaaccgacctgtacactcctgtggtcttctccttggtgggcagggcccgggtggaggaaggggctgtcctgggcctgggccggtctttgcacgtgacattagcagatttgttgatggccaccagggacagcaggtccggaggcgggagggcttgaggtccctattcttgcccaaccctcctgtgattctcttctcttccacctttgtctcatcccaaccctgagccatctccaaccttaaaagaaatgcattcaccccatctccatttcactctatcccattctccaacactttcattcattcaatcaaccagtatttgcgaaggccccttaagtgccagccaccaggctgagaactggggattggctatccctgcttcaaggagatcgcagtgtgatacaagctcagttgaggtacaaagaaaccctgttgcccgggtacccaacctcgtctggagggtggagcatcatggaaggcttcctggaagaagctacatattaagctgtgatctgaagttacctggcatcaggaggactgagagtgagaaggggtgtctgagagcattccagacttgtccaaaacctcaggggcaggcaaaatcttgtgaatctcctaaactgcaagaacagcaaagtttgagggcagggccagaccgttcagggccttgctgccaagtagagaatagatccgattagatcaaggtgactggatggaagcagggaagtcagttgggtcaccaggtgagaggtgacgatggctttgactagggtggcagtctccagggcagatcccggagatattggtgaggggggagtccaggcagcatctaggtccctggatcaccgagacgggggcacaggaggcacagggagtggggacatgtgtggtctgggcgtgtgagcttagggtctcccaggcatccaagtggagacgtcctgggccagggctgggcctcagagtgaccagacgggatgctgagcacccgggtcttcaaccaggtggctggccactgaggcacgggatggatgagttccccagaggaggacggcatgggaggaggaagaagctgaagccaaaccctgaggaatcgtgaggacttgggatgggatgtggctgtggggtctctagagatggtggcagggatggggagtatggtggtgatggcagagactcgagggaatttggtttccaaggtgcattccttgaaactctcagggtgtgtgtgcatgtgtggacgtgtgtgtgtctatggaatagctctgtgggccggtttgcctggatatgtcctgcatgaagctgggggtctgcaggtgtcagaccatcgtgcatggctgtgtctcctggcgaggccgcatgtctctgcacctggagacacgtgtccctgatgtggcgacgtgctggtggagatgtttgcataccccacacggcgtcattgcctatctttgcatgtctgcatctgggaggcctctgggcctcctgtccgcagacctgacgtcccagtgttctctcccttctgcc

SEQ ID NO: 331 - DNA, 16179 bp, Homo sapiens
  source 1..16179: mol_type = genomic DNA
cagggtggcaggaaaaaggaccaacggggctcacccgcaggtcccgatagagggaccacttcagaggcggttcaaggagccgagccccagggtgggaggcctgggaccagcccccgggggacagcgacggccccaggcctggaggaccggatggagcggctggcgtgccctgcagggggagtgggaagaaacggggaagccgggccgcggtagcgcaggccgcaggcagggctgtgtgggacagggcggcttgcacagcttagcttcttcctggcccgggtgggctccgtcctcttctctgggccagctgcgccggaggccccgggaagagtccccctgctctggcccgcgggacctgctccccagcctggaaagtctgagctggccccgctgccgggacaccctccccagcctcgctggtggcctggtttctgccgggcgcggggggaatgtgggtcagcgtttccaagtctggcccggggccagaggcagtggaaggaaaaacactcagcgggggctgcctggcagaggcctcacctcacagccggcggttccaaccccgcagccagcagaggcctcaccccacagccggcggctccaacgccacagccggcgactccaaccccgcagccggcggctccaaccccgcagccggcggctccaacctcgcagccggcgactccaaccccgcagccggcggcctcacctcacagccggcggttccaaccccgcagccggcggctccaaccccgcagccggcggctccaaccccgcagccggcgtctccaaccccgcagccggcggctccaaccccgcagccggcggctccaaccccgcagccggcggctcagggctcaggaccacagggagggcgccccaggcagctcctcctcctgggctctgcccccaccgccgtcctctggagatggcccgaggctggtgcccatgactcaatgtcccactcccgcatctcctgcggtcccagggcgggtcccgctggtgtgtggccggcctcgcaggaaccacttcgctctcccccatccactactcccacaggcaacaggaccggccccctggcccgtcggtgggcgcatcagcttggtggccctggccccctgcgcctcaggggtccctcacaggccggccagcttccagcaccctccctaagtcctcggccccttggaggctgccatggcacctgaacctccccccgcctctccaggcacagctcgaggttgggcggatgggggctgcatcccgggcaccacatgtgggtaggcactgccgcagcccctcgagtagccctcagcaagcagggctggagggtgggctctgtgcaaaaccgccatcacagccccagggccatcagcaggcagaggcgcaaagcctggtcatggccagcagccctgggatgcccctgccccagaccccccaccccggagacccccagccccaggatgcccacacctcagcctcccaagtagttgggactacaggtgtgcactaccacacccagctgatttttttttatttttgtagagcggtctcgctgtgttgcacaggctggtttcgaactcctggcttcgagccatcctcctgctcagcctcccatggtgctgggattgcaggcgtgagccccacgcctggccacgcgccttgttgagttggtgacttcgcctttgctgtggggatctgggttggggtcttgtggcttacatgagaatagaagatcatggggtagttcctggcaccctcccctcaaggaggctcacacaggccaggaccgccccctctggctgccccatcgctgccccccgacaggccctctgcctctcccctgtgaaccacgaagcacatcgatggggtgcctagcgccccgcctcagtcagggctcatgggggaggcccttctttaacgtctcttactgggcacacccagaggccacgtgttccagggtcagagagaccaggagaaatcccagcttcttcactcacggctgtgcatcttcaagaaggtgactgtgcctctctgagcctcagcctcctctgtctgacagcataggggtctgcaagtctctagaggtcatgtgagctccatgggaacctctcatctataccgtggaagcagctgcgggaagtgcacgtgagctctgtggcctcatgccgaccaagaccctgggggtcacaccaggcatagctgagaagcagagcagaggccactgcggtgaccagggttactcccgagactcagagcagaggccactgcagtgaccagggttgctgcctgcctgccacacaccccacttgggcctctggctgtctcctctcctgcagaaaccccatgggcaggtgtgcagccagcatggagggaagatgtgtgtgccagcagagagagcacgaggcctggagttctcatctgtgccaccagaagcaggggacagtgaaacatcatccatgaccactagggagacggctccatcccaggcatcacaaaccagcccagaagtgtcaccggtaagcgcgacagcagacactagaaggtatgtcatccatactcattatccagagaaggtactagaaggaagccagtcactgcctctgagtcagaccagaggacacccccctgacatcaaggtgaggccaaggggagaggaaacagggctaagtagggcctgtgatgtcagcatgtctggttgggcatgtggcagggacgatgactgagatagaagacataaacctccatggtccaaacatgggagctaaactcggaaagccaacaggacggggacatgatgaggggacttgagggtcacaggagctccctccgtgtctctctctccataattaggtctagtggcaacagaaaaatgcagacagatcaatatggatggtcatgctcacgttcctcatgggaaacagcgcttccgaagattcctcacgggaaacagagcttccaaacgttccgacttccgataagtccatgtctgttgtgtattggctgcaaagaaaacctcaaggaactaaaaagtagaataattaaaatgatcctgttatccaaaaaattgtaaaataaataacggaaagtgccacctcttcccccagaaacttagaaaccaacacactcccaggtagcccttgggtaaaacaggatattaaatctgaacgtgcactctctgaaaagccgagaagccataaatatcaatccataaatatcgaggactcagctaatgcagcgcccagagcccccagcacagctcttattttttagaggaaaaaataaacgagagggactttgtgccaccctaagaaactagaatgagaacaataaagtgcattttaaaaagtagggagaattatgaagataaagccagaaattaatgagtagaaaacaaataagtaaaaaggagaaatgattgttttctgaaagaaataaaataaaatccccttgcccagcccaaaagctgcatcaagaaatgactgcctaggctgggcgtggtggctcacgcctgtaatgcttacactttgggaggctgaggtgtgcagatcacttgaggcctggagtttgagaccatcctggccaatatagtgaaaccgtgtctttgcaaaaatacacaaattagccgggcatggtggtgcgtgcccgtagtcccagctacttgggaggctaagacagaacaattgcttgaatccgggaggtggaggctgcagtgaactgagatcgtcccactgcactccagcctgggtgataaagtgagactctgtttcaaaaaaaaaaaaaaactaaaacaaataaatgactacctctatttagaatttttgtacattgaaataaaaaaacccacacatgattaggaagaaagagaccccagtatggaagaggctggaggaatgatgagacagcccgctcggccggggcagctgcttcgaaacctgcagcagccatgttgtcgtgggtgtaaagtccagaatgactctggatgagcggcaccacgcagagatgagcacgaggtgctggagagggcgagagctgagccaggaaaggaggcaccaggagcagatgtccgcagctgacgatgacctcaccttccatggaaggaaagtcatcccagggttactttaaccttcccaagacatgaaaggatggaaaactctgtaattcatctcatgaaaccaggataatctaattcaaaaacctgatgtggaacaaaaagagaaaaccatagacaaatatcacttttcgcagatgcaaaaaaatctaagtaagagaacagcaaataggactcaatgcagcatcagcggattctacacaagagaacagcaaataggaaccaacgcagcgtcggcggattctacacaagagaacagcaaataggacccaacacagcgtcggcagcatcgtgttatggccaagcagatgaaggccaggcttacgagggcagcgcagtcatcagagacgtcatttcattagccaattagcacagaaaattcagagaacctcaccgacaggtactgaaaagaaaactgaccaaattcagcaatctttatgaataaaagcactatttctagtaaaatagaaaaaagtgcaaaagtctctgtccacaatagtggccaagatcgttctacgtggaaaacacaaatgtcacaaatccagggtcgactcgtggggcctgctgctgtcataattgtccagcattttctcggaggttctggcaaacttaatagaaaaaccaaataaatggcacaaatatcagaaaaataagacaatttattttgttgatgacatgattgtaaacctagttatgcctctgctccctcatttaaaaattaaaaatcaggccaggtgcggtggctcacgcctgtaatcccagcactttgggaggccaaggtgggcagatcacctgagatcaggagttcgagaccagcctgaccaacatagtgaaatcctgtctctactaaaaacacaaaattagccgggcgtggtggtgcatgcctgtaatcccagctactcgggggtctgaggcacgagaatcgcttgaacccatgggtggaggttgcagcgagccgaaatcacaccactgcactccagcctaggccagaagagtgaaactccatctcaaaaaatattaaaattaaaattaaaaatcagtaaaaacattttaatacaagataaatatacaaaaattagtaacttcccactcctctagcaataatcacctggaaattttaaaaaaagggagtcaaaatattccctttgccatggcaactgagtagttgggggtgaaggttaggatgctgtatggagcagctccggccatggggagctcgacagaggcgtcatttctctcccacatggtggctgagaatagctgggtgtgctgctctgtcgccacacatggggtccccccatcacgcctcttctctagccttccaggcatctttcctggctgtggggttctactgggtgcagaaatgcccacgtccagctggcaggaggggccggggccagggcaggagaggagaggccatgttttccaagaccggagctggcaggaacagtgtctccaggtgacaaaagcctccgacaatttggcgagaaaggtgggggtgggcatgagaggatgcagggcccccaccactcaagcaaggagagcggggggcagagccacggagaagacccagtctggagcctctccccccagcctgaagcccagcctccaggttccatgaaatcacctccagttattccaggagaaacggcgcacggcctaggaaagaaagaacaggcagcttggacccaggctccaatcccggctgctagttaccagacgggcagccacatcgcgtctgtgtgcctcagtttctacacctgcggctgggttgatggttgtgtccgcccggtggggctgctgtgagttaaggggtgagaaacgcttccctgtccactgtctctgacacgttcttcctgggtcacccctcactcaacacccccagagaccaggcaggctccacggacagttgagaaggcgtccagcctgcagaacggagtccaggacccagagaagcttcaggggtgagcagggtgggtcggggctggggagtaaatgacagagggagcaagtggagggaggaaggggcttcaggacaggaggtgcaggctaagcgaggatggctgagccgccctggtgtcagagcaggggaggctcagcgggggcgggggcgggctcagcctctgcgcttctgcctccaggatgttatggatctggcagggaacgtgtaaaccatgagctcaccccacgggaacgtggtttcctctggctgcccccacaacagctgttccccatcagcaccggccccatctccctagcaggaagctgggcagccactgcaggccaggtgtggacgaccctcacaactctcccatctgcgtggacatcgctggacggggtggtaagggggaggggagcagcgaggagagggtgggtgcagccccccacccctctggtccctgcctttgctgtgagcaagtggagaaagcccagctcctggaggtggggccaagtctgcagtgtcctcaatgccaccaaccaggcctgaccctgaccactgactgagcaccacgtggtgcctctgccctggatgtgggcacccccgtgccctcctggctctgttgcagcagacctgtacgccagggccttctagacggttctggcccctcccgtgtggactgttcccaccatacctggtctgggctgaggcttcctggcccttccccctcccaccctgacgaggttggcctggggcgcccatggatgcaccctgcccacatggccctctgcggtcacccacagccagcgggacccagattccctgcaggccaaatgcaggtgccccagttcctccagcccctccccccgcagtatgtgggcagtgacaaagagggggtgggtctggccctgtgccatgctggggccccatgcccgccctacctgccctgagtgtcccggccgtgagtccccagcccactggcttcaggcacttccaagccccttgctcgcttccctgaagaggctgtgggtttctccaggccaggcctgtggtcagcaatgcaggcaggtgtttgtgatcagggcatctgtgctatcaggaacagcccccaaaccacgcagggagggaggaggccctgagagagaaggtgccgttacatgcacgtgaccacagagaaggctgccttcaccccgtctgcaccccgggagtgcctgccacactgaggtccgcgcgcagtttctggttttctgatgctgacttttttttttttttggagacagagtcttgctctgtcacccaggctatagtgcagtggcgtgatctcggctcactgcaagctccgcctcctgggttcacgccatcctcctgcctcagcctcctgagtagctgggattacaggcgccggttgccacgcccggctaatttttttgtatttttagtagagacggggtttcactgtgttagtcaggatggtctcgatctcctgacctcgtgatccagccacctcagcctcccaaagtgctgggattacaggcgtgagccacctcgcccagccggtgctgccttcttgagccgtggcctccacagtgcttcacctggctcccgcaaaacagcttcattgagatgaaattcacatgctcacaagtcactctttacagtgtacaattcagtggtttttagcatgttcacgaagttgtgcaaccatccccactcatctcactccggaacacgttcatcatccgcagaagacgtcctgtgcctgttagcaaccgctccccgccacggtttgagtgaggccacaacagaacatcagacagcagtttatcaacagagacttcctgcctccccgtctggaggccaaggttgggttctcctcttccacgatggcccttgcacgtcgcatcctcaccggctggagggtgggtctgccccacaagcccttttcatggtggctttagtcacaagggctctgcctcgtgagtggatcaaacacctcccatcagtccccacctcccggcactccacggggtctaagtttcagcctgagctttagaggacggaaacgttccaaccacggcactgcacgccaggcccagtactcaccgctctcacatacaaaatcatatgagtcagcattctctagagggacaggactcataggatacatgaacaggggatgatcttggactccctgcccaccttccagacacatgggggcagggctgggcccccacggcttctgtgggctcagcccactcagtgctcatgggtcggagtctcctgcctgccgctctcccaggctgtgcttgctcgctggtggccctgcagtcctggggtctcggaggcagcccccacctcagctccggtgggcatagcctcggtggggactccgaggcagctccaaccccacgatgagcctctgcctgggccccaaggctgtcagcaacatgctttgaaatctgggtgcaggccaccatcgcctgcagtgtcagcgccccgtggatgccgtcaaggccccccgcatgtgcctttgggagcgatggttggagctgcgcctgcacctgcctgagccatggctggggcggccaaggagggctgggccaggatcgggggagacccaggcaggcagtgagctctgcggtcccaaaggtgccccagggtctcatcccttgccatgattctgtcctcagggcccttataaaagggctagaaggaactagcttggctgtttttcctccgaattctgccatgtgaggctggatacgccattggagctgccctcagcagaccccagcctgccggcacctggatcttggactccccagcttgagaactacaggaaataaatttctgttgcttataaattactcagtctgaggtgttttgttacagcagcggggatggactaagacccttcccattttcccccagctgtgccctcgcccccagccccgggcagctgggagtctactctgtgtcaccgtggacctgcccattccagacatttgacataaatggtctcatgtgatatgtggccgtctgcgtctgacctccttcacttggcaaatgtttgcgaggttcatccactttggagcatgggccagagcttcattcctttttacgggtgaagaatagtgtggggccaggccacaatgtgcccatctgtccctcagcagatggacatgtaggctgtgcccacctttgggctattgtgaataatgctaccaggaacatttgtggataagcttttgtgtggataagcttttgtttctgattctcggggacgtgtacccaggagtgggattgctgggtcacatggaattcggcttcacactttgaagaacagaacagccgcatgtgaggttcccacgtctccgccctgacacctatgatgctttcggttccagccatcccagtgggtgtgaggtgtggtctcgtgtggtttttatttgcatttccctggtggctaatggtgttaagcagcttgtcatgagcttgttggctggtcgcatatattatttggaaaaaacatctattcaaattcttttgccttttttttttgagttagagtctctctctgtcacccaggctggagtgcagtggcgcgatctcagctcactgcaacctctgcctcccaggttcaagcaattctcttgcctctgcctcctgagtagctgggattacaggcgtgcaccaccacgtggtggctaattgttgtatttttagtagagatgtggtttcaccacgttggccaggctggtctcaaactcctgacctcaaatggtccccccagcttggcctcccaaagtgctgggattacaggcgtgagccactgcgcccggcctctcccagtttgcccattttttaactaggttgtttatctttgtattgctgagctgtgagagttctttagcacactggtttttcactaccttaccctggagccgatacacatcctttctgctcagtcattagccagaaatgcagagaaatgctactgtgtgaccccatgacctcagcctgatgtgcaggggtccccagaatattagacgggcactgactgtctgcaggatacagacccgggagggtggctttgcactgctgatctgaacacagcctctcactgattcaaaacgtccttttggcgtgtctgtaatgcctgcgtgttcaccgttcgcattgttactgtgagcgacccacgcaccagctccacacggggctccctaggtgcagcctccggtgtgtgttaaaacctggtggccacggttcccttgttcatcttttgttccagaatttccttagttttcttacttatttttccacgttaacttcacaatcaatctacctgattccagggttctccggtgttttaattggccccgctgtggcagccggccagcacgagggacggcacctcgtgacgcccaggacagaccgggcttgttgctggtctgtggtcctcagtcaggcctcagaccctctataacaggtatagatgtgcccgccgtttgctcctagaaatttacaatttttgttgctgttgggaatggtcccttttctttcttcattgtctctcctaactggaagtgcttgaatttgaaagatgctgattcctgactctgaattttgtgcacagccaccctccgaaactcacctctgccttctaatcagttttccgggtctatgaggagtcgcagcaggctgtgctcgggtgcagagcctctctccagccgtgtgcatgcagctcttcccggggctcttggctgtgaggcctggcctgtccctgtggctaaggcggaagacccagctgtcccctccctgtgccctcgccacgccctccccgtaacgctgaccagactttgcacagggcagggccctgggggcacatggacaggaactggctgtgggtggagacagcacccggctgaggtcctggggaagaggccatgcccggagctcctggacacaggaggtggcgctggctgaggcccgatgcctgaactgggcatggggggaggcacctttgagctggggcctcctcggagcagctgcacccaggggcaaaccctgcccctcggtttccatgtccacatctttactagaactgcagctggcatccgtggagctgtgggctttgtccagggagagccgtgcccagcacctgggggaccctgcagaggtgctaaggttcagggttaaaaacgaggatcctggcctcccgcaatcctgtccccagaggccccatcggagccgcctggccttccctgccagcccaagcatccgaggcttttgccagcagtgcctacggcagccttgggaagggtgggggcccagggaggggcatcatttggtgttgatcaggggagatgctggcgtcaccacggccccagggcctccaggcccgcccaggctccctcactcagatgtcccacccacaaacacctgaccaggccccaccaggggcccctctcacccctgaagctgtgcaggccctcggctgacaaactgggaccctcagcttggatgggcagaaaggtccaggaggggcctctgagacctcctcgctcgggcctgggggttggggccgcaggaagccatgctccgcccgatgcccacccctagctcccctggctgcctcctggcctctgtctccctccaggcccccaaccctgaccagggagtggggggttgggggcggagcttttgggaggaggccacgcccagcattgggtttgcatttccagggagggcttctcctgcctggtctcctcccctggtactgggctgggggctgtcagggtgaccctgccctacccaaggctgacccggggccatgaacaggaggatgcccccctccctgctcctcatgtgtgcccccacgggagccagcgggcagcagctggaccccagcagcctctcagggcacccaggactggagagggccctgccaagggtctgcgggtgccactcacccacccggctgcagcccccagctcccctgggctgaccgtgggcctaggccgagctgaaggggctggcggttgtcagcccttggtctggccccaccactgctctgccagggcagggggaggccggcagcccaggttgtggggccagagggccacgctgtgacagacgagaagagggagtgacctggagggcccggggcagggaccaacagcaaatgcctccctaggtggtctctccaggacagatgtgtcccctgtgggagggctggggcgcccagcaaaagcagcagctcctcagggaacggggacccagcgggctgagtggggctcttggaatagaaggagcctccccaggctcagctctgcaggcggagaggggaggcagggcctgaggctcatggtagggaagcggccttgccctgtgaggtctccctcagggggcagaagagccgggaccccgccagcagcagagaacaaaccccagtctaaggcgaaccccaggtgtggggtaggtgtaaaagcagatggctttgaccacgagtgcacaggtgaggggcagacaggtgtgagcaggtgtgagcaggtgaggggataggtgggagacacatggagggtgggaggagatagggacaggagaagaggcagtgggggcaggtgtggggcaggtgtggggcaattggaggtgggtgggggtggatggtgtcatttgggagtggatggggttaggtgtgagcaggtgcagggcgggtggggagcacggggaggaggctggagttggtgtgggcaggtgcagggcagtgcccgggaggcactgtcaggtgaatgtggggctgggcagaggctgacctgggacgccagggctgctgctgagaacctgctgtctgggcaggcagccgggccccgccaggtgtgactgcccactgcacagagggggtggaggccggaggcctagacgcctgtaggggctgggagggatgtgggtgagtccggctgctcgacaccctccgtcccaccagtgtccacagccctggccccggctggccccggcgtccccacagtgggcacccccagctggagccagcttgcatcagggacctggatagtgagtggcgagccctccacagtgggatcctacagacactgctaccactgaccaacggggtcagtagctggtttaaaaaagaaagggcagcagagaggccacccagaagagccgctgtttccatgtgccgcgcttacacatgctccagagggtccggctgcctaaccatgcgccgcgcttacacatgctccagagggtccggctgcctaaccatgcgccgcgcttacacatgctccagagggtccggctgcctaaccatgcgccgcgcttacacatgctccagagggtccggctgcctaaccatgcgccgcgcttacagatgcacctaaccttatattgttcaagtctcatgtcctgcctatcagggatgttttcggaccctacatgggaagcccttggcccgtttgaaggtcgggtcagggggcggctgaggctgtccagggcagtggtcaagggcttggggaagcggaggtagactcaccaggtgctggtgctcagaggggccggggaacacccacgccctggccgggccaccccgtccctcctggtgcttgatgccaaggggagcgggtcaggccgcgagaggcccagggccagcctggggagcagagctgctcagcggggcagaggtcctcctccgggcgccgggctcagggcccagtggccagatggttttctttgctgcagggagtgccggctgcgggggtaggcctgggagggctcatgcagctgctcttgggtttctctgctgttgttttttgctggaaaatcaatcctgcaagtccagctgggctctggctgagagcagctaggggtggggatggtgggtgcttcccggcccccacggggcaagttctgggcccacagtggggagagaaggcaggatggggtgcagggccagcctggggtggggccccgaagagcctggctccctgccctgtgccctgcttgggccaccccagagggactgtcccgaccctcccaacttcctgccaaggcccccggagctgcctgcagcctccccttgctcccgtgcccggggcggaagtctacaggagaccagagcccgggtgttcatcagcagccgcaggagagttccccaccaaggcgcagtagcctgaggtgctggggctgcccgaccctccccagctccacccctcttgcctctgagccctacccaaggcctggagaatcaccgcttcctcctgctccaggggttccagcagggcccttggaggatgtgcctgccgcgttctcagccctctctgccgacctttcttgaacggactctggccacggtgccaacgcgtcaacggtctgtccgtctgctgtccgagctcaggggccgtccatgcctccacggctggcatacagtagctctggttttacccatgagggggaagcccagcacccgtgccctcgatcacatcgccagttcacaaacacacatgcgcacacgcacacgccgcccgcccaccaggcagacacccacacacctgtgcacgcacgcgcacgccaagccagcgggccctgcccctgccccggagccctcagtgtcagaaccaggctgctgtggctgtttcctctttaattcgcctgagttttatgagcccaaattcatagacctttgttgctgcatataaacttgaggataaacttgttgaatttgttcaacgtaagcagctgaaattctgcgtggggtggtgatgaacggctctagcactcggtaaaaggtatttaaagcgcatgtagtttacaacactaacagcccgccgcccgcgagcacagcccgtctggtcatccggcggcctcaccgttcaccacggttggcggccctggtcactcccacggtctttaccagccgggtgccagtggctgggaccaggttctgaccactgtgcccactcactgtggaatcgcgtgagcaggccagaccctgcgtcgtaaggacagagcaggacacgtcctgtcatggggcacccgctgtctgcgactttgtttccgtttgtttccgcctcagcttgggggagacagttggcaggcaccagaggcgctcctgtgaggtcacctggccagtctcaggattagctgcaggctttggctgattttcttgggtcttgtacacagatgcttgtcagcaaataccagagacttatctcttcccttccaacatgcaaaccttccttcatgttcttgtcttaagcgttttggcacaacctccagcctaataccagcctctagggagataaacagtgctgccgatttcacaggccaggaaaccgaggctgagggccccccacccacctcctgctaccccgcacccctcctggggccttgctgggcggggtgactccccggaggcggcaccaaggggaggttcgtttcgaggctcagagcacttttctgacagctttctgtcccttacatcccagactcagttacacttcagcgtcccggctccctggccgccaggctcacaccacagacagcccttggaggcattccattcctgccccgacccttcaacttggaaacatggaaacaatgaggccagctgagtgggagcctccaggcctgtgtccagagctagttcccagtgtctggctgcctctcagggcggggcctgtctccagctggagctgggagggcggcccaccctgccagaggccagccccaccctcggctgccgtgggggctgaccagggcccagtgacccagcccagggcttgcctgtggagaggctggagtcagccgtcagcgcggaactcctggtcttcccactgccacctctgcagcccccaccagagatatcagaaaacatcagctccagcctgcagcccagacacttgaagtcaccttggctgcccctcctcacacccgtgcccacgtcagcaaaaccagggccggcttgttaaccgtgtccagaacccacccttcccaccctgcccaggccacctccctcagtggcccagggggctccaagttgaagagcccaagacaggtcagagatgggctgggcggcctctgccactcacctccggagagggcagggagcagaggcctc

SEQ ID NO: 332 - DNA, 7556 bp, Homo sapiens
  source 1..7556: mol_type = genomic DNA
atattaatgtagcactgtaatgacagatttaatattttaaaaacctataaatttatgctgggatattttaaattctaatgtcatttaaatttgactctgaaatgatgaaaattacctaaatattcttaatttttaaatgatttcattacagttatagaaaatgtcattactgagctagggaaaagttaagatattttaaattactcaatacttcaaaggttaaaattttctttaatgtcctctcttatccattttgttaaagtcctaattttttcaatattaatgaaatcttggtatttttaattactaattaaagccttaaaagcaactggtcaagttcagagaaggaataattaagaaaattatatgtgttgttaaaatttatgttttcttggtttaatttttttaatataattttcaatttaattctatttttgaaaatgtattcaattgtaaagctgttagcaaaatggtttcgaagtaaataattataaatcaaagcttataatcagaatgatttcttgaggttggaagtgaaaaaaattaacattcattaaactagtaatcttaatataaaatttagtctcaaatctattacacatttaggtttttttctgaaataatatttctagaattatagttacctgaaattagactagatgacctttaagatctttccaacctggagagcctattaatttacctgctgaataagactgatttaagaacaagaaccagattaaaaaattttccagcattcctctcctcagttgcatttaaatccaaagaataaaattgtgatatatatggctgctcttcaattttgctgtttattattttttaaattattatattcaaagaaaccctttccaaatagtttctgtattcatctccatgctatagaatatttcatttttaaaataaaaatgtaatagtgatcagttatttaaagtatttgtgtggttttatatcgaatgtggataattaacatatagcatgtttcatataaatatgtatgtatgtgttagagcttataatgaaagaaatagtgataaattgaataaaacagtctagctttttgctgcttttctaacctttattgcatgatgatgcatctaatttttaatttgtaaatacaagatagaattccctctagcaccatttgctttcataaagctgctgagcagtttgctgtcttgaataaattttgctttggagggggtcgggggggatttgaaccagcacattcttgtgtggtttgtgaagattcacatggtaaccagcggtgtgcattgttaggtttatctgaataagcaccagccatgtgagttttaacatgattgcccagggcaatggagagagaagagagaaacccaaaaggattgcacttctctctgttttttggaaagtgcatttgctgggggagggggctgcaggagtcagtggccatggttctttttttttttttttttttttttttttttttttttttttttttttttttttaagctggtgtcctgtttccctctaggtcctcatttgttctgctatctgcctcatcatctacttcttcttttcattgtttaccttcctaatgagggaggcggggtagactgggggttgattgacagctacaagcccttacagtctggccagagagcagttggctttggtttcaaaagtgttttaaatgttcgatttggtcctgtttctattaaatgaaactgctgctcatcttaaggaaatcatcagaccagcaaagattaggaaatatattattggggtctaaaaccttcaaaaaaaaaaaaaaaaaacgccccccatccatggaaagagcactgcccatcgggttttccaacctttaacatagggtttcagaaagaaatatgtaatttttcctttgcaaaagtgctttgatttgaaaccacccagcaaacgtctccaaaagaaaactggctgtgatgcgatcgagagctgcagtgtaatattgcagagcaaatttattttttacttcaaagaaaaatgctaattagccgattcactacttttaaagttattgtgaagcatatggcgcccagtgtgagatacatccaactgctaaaatagagcgaagaggaaattagcgaagaatgggctgtttggggtgagagtgggggtgggggaggaggataggttctcaggcagattctctagccttttcagaatgattttatcgcccatcactgtttcccgcctcctcatttacccacttcccccactaccaacccctgggccaacctcttctgggcctctagctcccctcccccactttggctggattcaggtgcgcacctcaggctagccaccagttcacacctggttctaagcaggttccaacactgctgcagccatctccattcacaggacctgtttaggaagtagacttttagcgaggaagccttcaccacaacagccaaactccccagaaaacactagctagtggctctataatgtggtttgctgagaaatataaggaaactggaaaaggcgggaaggggagggcggggggccgggtgttcggaggccctgccggtgggtaactagcctcccgtcttctgcagactggcagaagaccgaggcccagaagcgacgcgaacagcttctgctagatgagctggtggccctggtgaacaagcgcgatgcgctcgtcagggacctggacgcgcaggagaagcagtgagtgggcagtggggtcgggtcgaggctgggccacctgccgaggggccgagaagtgtgcggaaagttcaatccagaggtcgcgggagggccggggcagcctcccactggcctggtgctccccattcccgctggggatccaaatactgggcgacgggggagtgctgctctgccctccacgaagaaaaataattttgtttcctgtttgtcctgtttgtctgacatccagggccgaagaagaagatgagcatttggagcgaactctggagcaaaacaaaggcaagatggccaagaaagaggagaaatgtgttcttcagtagccatcagatcagaaagaatctctcccaacattttagagtcttgcttcccaaaccagaaaaagtcagactcattgttgatttaaaacttttaacattttgtttggctggattgtactactttacctctactttaccaccaccacccttttcctccctcctttccaaataatatacagaactccaaaatagcttcatttaaggatttttttgtgagttaacaatttccttgaaatcctgtgaaatagatttgcacagacaccttgtgagtgattggtattggaggtgttcaagaaactgttcgaaaaagaacaaaaacacttccctcgttattttctctcattttttgatgagaggaaaatttgaaacattattcttgttgttgttggtaatagcataatgacagtgggaggggtacaaggggataagaaaaatgtcatgatttttttccggtcctgccacatgtaacacttactctgttacctaaattttatagttagatcatatccaatctacttattaaactgtgttctatttaccagtggagtttttctgcagtggttgcgtttcactgtaaggataatggagttcctctcctctgctttcctcagaggatggtcctttaacatagccagaaacaagccctgtggtttgaaggtgagctgtgaggatgggactaattgatatgcaccagtttacaaagacagtcttatcatccgagaatacaccatctttttctctggataattatttcttacatcatgcttgattcctacattttgttgggtctcaacattggctcacgaatgctgttaatatttattctgtattgataaaaagtctgtcttgccactacaagtaaatcccccatttaatattttcttctttagcatagcactgtcattttttgtgaaaatggttatgtttatttattacaatactgagtcatatataaattttcaataaaagcagaaactttcttaccttaaacacggctgctactttcttgcaatgaaaacttgacattggcttgaatggaagtttgtctatccgtaagacttttcatgtggaaaatggtcctctggaacttagggcaggatactgggctgcatttgaagctgaataagtttacaccatcccagagggggccctactgacacacgaatgcgaattgaaaagtaattagtcatattcttaagcagtataaactatcatgtcttttgtaaagggtcatctctgctaaagatttgaggaaatttgtgattccacaccaatgaaaaaccaatatttatatcttgaattttccacgtcattactttgaattgttagagttttgaagtcgtattagggagagtcgtgtcttctgataaccggcaagtctgtaggtactgaagtgaaaggaagagggttattgttggggggcggggagaatgtatgcaggtatgtgtgtatgaaatgagggaaagagaacttttaacaagaagttctaggctacagaaaaaaaaaaaaagcgattctatgctagtttccttcattcccccacaggggtgtccaaacaaagaaagcttgttcaacaagtccagaaacttagagaaaaaagtccactagcatttatacttcagcgtagatcgtatgtatgtgcacacaaacaaatttcgttccaagtatgcagccacctccagttgccagtctttcaaaatgataaaaacttgctacggtagaattccttcatgatgagcatttcttttaagttattgaaaagttattttaagtaaatgaagtcggtatttgccctctttattcgagcacgagagcagagagagagctgctgctctctggggaacgctctcagaatcccgttctaaccccgggaaaactcagcagacagaaatcgcccgccccaagcagcctggggcctgggcggccaacagcacccacccagtttacgcttgattcgaggaaccttcactcccgaggggcctcgccgaaaagcagctccttcgctcccgaagccgctcccaatcggccaactgacaacccttccctcgccccagatttgctaggatggtctgggaccgccgggcggcccctctacctgccccttcagctttagtcccgagcctctcggggtttcaatttgggctgctcggtggcgcccgaacgcccctcagcggcggtggagcgtggactccggcgcctggcggggtaaggcccgcggcaagggcgctgcatccggacatcgctgcgtggtgcccagacgctggctcccgagaacgggcacgagcccagcacgccggaggacccggaactcgaaagcccgcgctgcgggaaaagagactatcggtccgagggtcgcagaggagcaggggcgttggcagcgggcttgcttgggcacagtctgcgggccggagcagaacttccgcccctggtcagatccctcggcctcagatccaaagccctccccttgtcccaagtgtcctccagagcctggccgggcctggaggtcacctggatgctggatccttgtctccacacccagctccctcgccccttcccggctcgagggccttgagctggacggcttcacctcctccagtggtgtccccacttccccttcccgcaccgcggccgatgctggaacggtcatggcttctggcccagcatctcccacctggacatttgcctagcgacggccgcctcaatcctctgcgctgctttcaagaaactttcatcccagtctctctccctctccactctcctccctctccccctctcctctttcttttcttaatcctggggttttatgggctgagcgttaagaaaattcgcctgcaatttgggattagataaatactctaattaggaaaaaaaaaatccgtgctacttgatacctcccaacttccccgagaatggtggcagcatctggaaccgagagcgccggcctcccgcgaggcgtaccccggggaccgcgctggcacattccagagcgcactgccgtcccacctcgctgcgccggacccaggtcaggtgctgaggctgcaggcgaaacagggcctggtggagggaggaatgagttaaggtggaggaatggggcaaggtcacgcgccccggcactggagggccaaccccggcacacagcggactggccgggactagggcagcgccgggctatggacgcggacgccggcgaagcgcaccccgggacgtccgcatattctttcccccaaaactagtgcgctccagccggcgcctttcctcggaacctaaggaaggggtatatttcgttgctttctttaaacctcagcacgatcacagtggctccgagccgcgggcggctgaccgcgggcctcgcgggctactcctggtaggggcctgcgcgagcctaaggtgtgtccccgcctgggttagcgctgcgctctgcactgtttcttttcctcttaaagcttctttctcactcactctctccctccttctctctctcattttttccccatttctctcgttcttttattcagctttctctctttctctcccttttgtgaatgggccgcggtgtctttgttctgtagagaagcgcccgtgtcgctgacttttgtgaaccagagaaggatcttgtaaaacctccttttctccttcgtacgcccccactcccacccctcctcccctgcctctttgattagatgttccctcatcgtcaaaaaaaaaatgtaatttcgttggtctggcggccactttctttgaacattagctcgctttcagctccaacttcaattagaaggagttgattttgagagatcaacaaaagaaccgaccaaagccttattaaaggtcctaagaagatctcccgggtcctttgagaagcagttaaggaaacagtgtgccctccatcatattctgttaccgtattttattcggactccaaaggaaagtgtcgcttgggggagggggaagcactttgatgagcggcggccgcggccccttttcactcagcgggctcccccttcgttctcctcctcctcacccagcgcccggtccgctctcggcgcccgaccccgcagcccgggcagcgcgagtgctccccactgcgatgcgcctggaggctccttgacttgccctcacacttaatcctgtgcaaactttttaccccgcctgtcggggtgggggagtgggggagattagaaacaaggggtagaaattcctcgaaagggaataaagtgcctaattttcaggaggaggtgccatttaaaagattcgcctagcttagagttggaacgaaaactcttttttgcacttttaaaagtccacccaggtagacgtgtttgggaagttttttcgggtgggaaatgggcttcgcccgtacgaacaatccggggaaatcgcctcaaggaggatccttacgcagcatgtggaaaaaagttgagggcaggggtctgtggccacattttccatcaaaaagtccctgttagaggcagtctaagaaagagagagaaagagcgaaaaagaaactttcctatcaaaatgttt

SEQ ID NO: 333 - DNA, 25090 bp, Homo sapiens
  source 1..25090: mol_type = genomic DNA
aaactttaccttcaagacaggaaaaaatttaatgcagaaactgtgtcataaagcccaaagtctagtttagagaatatatgtagatgagaatttagtgcctgtaaggtccatgaaattgagttgcacatgactagacatatgttctactcaaatattatttttcagatatcttataggatctaatatgtatagcactatacatattaacatatattctgtattttgtaattatttgtcattgttactatttttatttaggtttaaattacaaatatgattcacaggctagtcacaatcttcatttggactaaatgtgacaagtattcaagtttacctttggctttatgaagtgaatctcactagcgataatgagtgaattacctttccattacatcttgaatcaacagttttgcaagcaatgaatgcaaaaattaagttgtctttttttggcaacaatttagcaaaggcatatgttccgaagtcaaatgacttcgcttcaagttgaaattaagaaatgttttgaagcatactcttttgataataatttgcttcaaaataagcatcatgcttctttttaatgcgacccacatccttaacatgtgactcaacaatatggtaaatgaaaaaacaaagtgctctcaaaaacagcctccaaatacattccagttcatgggatttgggtgcctgtgtttctttgttatttaggtccccactttatagctgtctatgcagaccccaccattttcttctttgttgcaatgatgacaaacgctctgagaaagaggagctgggcctctgccaagaacctactctccacttcagtatgtttcagctttcaagacctgattgttttctcctttctcccagggactactagttacctcattaccaggaagaatgaccctttgacagcacaactgcaatccagaatctccaccaaattgtaaccttagagatgccgatggcatcaaaaaacgaatcaagatcggaaggtcagaaagacaaatgcattagtacatctatagcctacaagttatttggcagttttcttggcttgcaaaaacccatttataaagtttcttttgacgtatttattgcctttttgcttacaatctttagactgccaggattcttaatgtataggggattccagtgtttgagattactgcctggatttgcaatccatttcataaaatgttgaacaagaaacaacagcttcctccctcttcaaacaatcagtattactatcttactcagtttttactacagcagaataccagtgagatcagccatttactaaaaaatatttcataaaacagctcaaactaaaaatgaagtcagataaaaagtaaactaaaataaatggtgagcttgctatttaagctgcttaacaacttgaattaatctaactttaaacttcgtcttgctattatcttaagttgattgaatgtactagttagagttttctaagatccagatagaccagtaactaattgcttaatttcttcaaagcaacttgaacttttaataaataatcataataagttacagcaaccatttattctctgctatatgctagatattttacttgacttatttttaatctttactgtaacacatctaggcaaaatattaatatacctattttacaaaaaaggaaacacactcagcaatttttagggacccaggagccagaattccatttcttccaatttccttcaatgtgttcacgatgtatcaagtaactcgttcatttagtcaagcaaccattttagctgatttagtcaccgattcaactaataacatttactcattgtcttagatttgggaggcatagcttgatagctgcaaggattatgttaaatgtcagtgaaataatggaatgtggattggctcatttcatcttaaagatcctgctcacagggcaccaaacattaaactagttttaataattaaattgatagacatttcctggagcaagaagctgtggctacattctgtaagtttgttgggtaatacaaaacattgtgtgggtgtgcaaaaatcaagcacacactgctaatgaaatcattatgatcaaggctgaagaggcttcacaaaagaaaaacaaagcgtcgttgagttactgatctgtccaagaacaggattgaaccaaagtggggtgaccattctgtgaccttacttactgtaccttttgttgaccacgagtagatagaccaaaaagctaccctgtgttgaagatgacattccttgtccccatttcctaatggcaaaatttttcactcaagtcatagaacaagaagtctaatgttaccatttaggaatggcatatctctttaagcccttctcagtggcttttatggcaatgaagaaaccaaacagcacattttccttgccatcttacacgctgtttttagtctttatctggcagcatgcctagagtataagggtttgtctctagatagatctttaagtctttctccttgccatttaccatcactcaaatactctcattatcagtggatatcttaaactctgggttacacctcctttttattctacttccagaagtagagcttctaaaactggtgcttctattaattataccactcagctgatcatttgtctgtccctaaagacggagttgaaaagacaacaatttcggaaagaaaaggaaaggtaaataatccaaagatagtttttatgtacaaaacagcattacctctacttaatatagcataaaatttaatgctctacaaaggagtctaagttcctaaaagtaaaattatttgcatatttcaatattagattccttattttgcttacacaattttacacaggcctctcagatagttgcagtgtctttaatctcatgttttccttcatgatactctctctaacgaacatcccataagtttctcactctgcaatatttccatttctagttcttccaatttttctaaggcacaagtatagaaaaaaatgcttaaaggaaacttaataagagttaccatatttctgttaagtttcctgacgacatgttaatgtatatatggggaaataatttatatagatgaaagggagaaatcatatatttccattatccttgacagtatcatgaagggcttcaagaagtaagtggcatttgagttgactcttaaacttggttcagtggtggaccaagacattccttgtttaataataagatgagtaaagtcacgggagaagaaaagtgaatgggttatcggtggcctgctgagttctctggtgggatttgagtatcagtgtatctgatataactatatctgatataactcacttttttgctcaaacaagccttaatcaactaatcaatgccttggtaagatggcataattcatccagtctctccatccagtctcactcttacatgtgctacctgagctgctacagctttacagccacaaatcagtcactatgttgatattcaaccacagaactttccaaagtaaacctaaatgaaaaggtgagctgcctcactttcttctagtctggaaagagagttggccttagacacaaacacctggaggctaagtggctggcagccaggaagagatggcaggaatggagacagatgtcatctgggatgcccattctgggattcacccatgacagttcccactgctttttctttttctagctcctcctccttcttgttctctccctaagagaagaaaaaagattaaagaagatatttgtccatctgaaaataaactagctttttctctccactactgctcctacagaggttctgtaggacacagaagccaactgcatctagtttgatggaatgttatgctgctgagcacacagaggaatacattacagaaaaattcattttgcatggtaagaactggccatgggctgtgtccattgaagtgatgtgtcataaatctagtggcatgtggcatttcacatcatggaatactccccacatcattgccagaatttctggtgcagctagcttgaatatttcctgtctactccattcctacttctaatgcctggtgactgaaatgaggttctctatcacctcttacttgaaacactgcaagaatatctcaactgatgatgatggtgatgatgatagctaactttcgttgagagctttcgatgggtcaggctttttttcttttctgcacattcatcttttaagaacttttactttgaaataattacaaatgtacaaaaaagttgcaagaagtatgcagaactcctgtacaactttttttcccagattcaccaatttttacataagtttgcaatatttgctttagtattctcgttctcttcttctccatatttttcctaagcaattaagagagttagttgtatagataatgctactttactcatttacctttcagtgtatattttcttcagtgtataaatgtagtacagtcaccaaattgagaaaattaacattgatactttttctaatctcaagtccatattcgaatttcatctatttccctgataatgtcctttatagcaaatttgtccactacagaatccagactaggatcataaatcacagttttcatgtctctttggtcttctttaaggtggaatctttacttggcctttcctttgaagcatacaggccagatattttatagactgtctctcaatatggatttgtgtgatgtgtcacgtgactacattcaggttgtgcgtttagggctggaggaccaagaagtgagaatgtgttcttttcacagtgtcacattggaggcacatcgtctttattggtgatgttagtttagatcacttggataaggtattgtctgttttcttctctgcatagttaattttttcctactgtaataaataatctatgatgagatactgcaatatcatataaatatcctgttcttcatcaactttgctccactaaatttagcatccattgatgattcatgcctgaatcaatttctttctgtgatgttgcaaaatgaggattttctttttttcttttcttttcttttctttttttgagacagggtctcgctctgtcacccagactggagtgcagtggcacaaacatggctcactgcagccttgacctcctgagctcaaactatcctccccgctcagactcctgagtagctgggactacatgtgcacccagctaattttttttttttttttgagacagagtatcactctgtcagccaggctggagtgcactggcaagatctcggctcactgaaacctccacctcctgagctcaagcaattctttgacctcagcttcctgagcagctgggattacaggcatgtgccaccacacccagctaattttcttgtatttttagtagaggcaggggtttcaccatgttggccaggctggtcttgaactcctgacctccggtaatccacccgcctcagcctcccaaagtgctgggattacaggcatgagccactgtgcccggccacatcccgctaattttgtgtgtgtgtgtgtgtgtgtgtttttcttgtttttttttttttttttttttttgcagagacagggtttcaccatgttgcccaggctcgggaaatggtgattttttttaaacttcattattccctctatattagctggcttactactgtaaaagcaagagctttctcttcttatttatttatctatttattattatagactcacggattcctgttcttttttttttggattcctgttctattcagtagacaataatccattacttccttatttattttgatggaagcctcttcaagctggcttcatgtaccttttgacaggccttcatatttttgggagcacttcctcactttcaggcactgaagatattccaagctcataacttttcctgctccagccatgaaatttgtagggtatattttaaacactttataaataaataatttcccaataaacctacaggatatgtactattagcattcccattatacagatgaagggattaagacacagaaaggttaaataaatactcctaagtcatagccttattaaatggtgaagtcaaattgttattgcctccaatcttgtgcccactctcactccccagccccagccaaatttattctccacaaagttaacagaatgatggatctcaaatgcaaacactgaatctctaccacgcagcaataccttagtacctggtattcacgcattaactacttgttgaagtgaattggtttaaactgacaaagaactaatgaataaatcatattcccactttctcctttgccatctttcagttatctggcccaaggatcataaaagaaattcctagaatgaaatgggaagagaaagtgaggatgttgtcataccttttaggactgacgtaaagatccctcttttgatatctgtcactatggccagtctggatctacttatcccctctgcatagaagaggaaacttccacctctccatctgaaatgctgatgtaacaatctctcattatactctcctacattctcctaactctgagaacctttagcttcttttctccaagaaaatatatagcccttatgtccctaaatttacactcagcctgtcacccactttgtgtcttcatttccttctttatctaacttagacccaatggtttattagctcaaatactcccaaacatgtagtcttaacttccaaactcttgttaccctgcaaactctcagatctagaagaacccaagcatctcactccctcactgaaattgctgagcacttttggagaaaattacacaatgatatggatggttggcaccacaaatctcccttggcaaggttcagcaatcttatgacctgatcttgatcagctccctctcctattcccctcaacaatgattttaagcttttgcctctctctttatggcctttccctaccatcccctttctctgagtgcctcctacaactgggagaaaatccagtgtatcaagcagcatccacattattttctcagccccacaccaccatttaatccatatgtatgcctgcctttactttcctctttatgtctcattgaggaggtgacttttaacttttatagaacttagcttatgctctaaatcccagcctctcctacaaccctctaatattctttcattaatttcttttctctttttctatatcgttaatctccattaatttatgtcttctattttattgctttatctttaaatatataagctcagttctttcatcttagaaagcaaaacatgccctgatcctacatcttccctttatctactgtcatattgctttttttccatgactaagattcttcaaattagtttacacccactgccttcactttctcacctcccttttgttcctaacccacttcaatcttcatctacccatgccttgccactgaaactgccttctctgaagtcatccatgacctcttagttgctaaatccaatgggcatttttcaggccttatattttttgacttctccctccctcccttcatcttcttttaccttcaaaaatattggttagacattggggataccatagtgaacccaagataccagaccttgtcaccatggaacacatagtctagctggggaaacagacattaaaccaatcatgacataattaactattaatgaagtataactgtgataatgatgcaaagaaaatttaaatgttattatgagaatagagaatgtagcttaatctagaggggaaatggtcaagaaaaattctcctgcagaagtggcatttaaactgagatctgagaaatgaatagcagttagctaagttacagatgggggacagtggaggaaagaagaaccttccagaccgaggaaacagaatgtgcaaaagctctgaggtaggacgaggctatactatttgaacaatgtaatggtggacaacatgactggattaaagagaataaggggattccagatggggctgaagatcgggggacagaagtgaaatcagtcaaggccttagaacattttaagaaatgtggactttatcttaagaatggtggtgggtttccatcaaaggattttgaataggaatatgaagagatcagatttggctccagaacccccaatggtgaagtccaaataaaactagggtggtggcagctgaaacagagagaaacatatgggttaaagatgcatttaggggcataattattaggccttggaaatttattggatttgataccacttgtggaggcattggggatgaagaaaagaaaaataaatatcaaggataaaacccaatctctagcacaagcaactgggtggatggtaataccatttaccaagacagtgaacacaggagaaggtgtttcctcaggggtgaagatcacgagtttagggtgcctcttgacctatagagatgtctactggagaactgaatgtataggtctaaagctcaaatgtaggttctaggccaaaaatagaaaactggggaatcgtcagccaatgaagggtaactgaagccaaaggactctataagattgactgtggggaaatggaagagtgaagagggagaagtcacatgtctactcagtcacacataccctctgacctccagccaggcttaactaccagttttctgtatggccttatctttctctcttttttgtttttgtttgtttgtttgtttctttacacatactatttcctcctgtcatgcctttctcctcacctctgccttaattcttatttattcctcaagacagttcaggtgccagttcctctacaaagcttttccttctcttcccctggtcacgtagttgcctcccattcattagatgttgcttctatcaggtcttataattccccaaagatatctgtaaaatagcagttattacactgtaatgtaatgttagtcaccctgctagactgtaaatgtcttgaacacagaactctacttatatctcattgagtctcagggcctagcacagggccaggcacataatatttctcaatgtgtacttgaaaggaagcaaaaagattcttctaggaaaagtttcctatgtgagtcatagaattcctgactattaaagccagaatggaccttggatattttctactccaacctattttgcaggtgaggaaactgaggcccaattacagagctaataagtgggaaacaatatttagaatccagttttcctggctctcagcatagtggtcttcccattacctaataaccaacaaacccattgagtaagctatttactcaatgacttgcccatgaaaatgtatgctgtgtgggtctttttcaaacatggaatattaaatgataactatacagatgcgaatatacaagcaattaaagtgacctacacaatatagaacaaatggagaatctaaactaacagaagtgttgaattcttatatgattaataaaagtagaagatgttaaaattttatgaattgttcacatgaggtcctgtctaagcttaggggtaggggtggtataggatgttaactatcccattaacaataataactggtatttattgactgctcaccatgagccaagtactaggataaatttcatcattcattaattcctttggtgagcatgtgaaagccctatgagaagtttggaagtgtgagtttgcctagggtcgtgtagctgatgagaggctgagccagcattgcgacccagactgtctgactgtaaagtgatgtgtgaagctgctgagctctcctgccttcattatttaaacctgtgtgtactccctccacttaggcagctctggttgccaccttcttctctttgccagtctcttttaaaaaggttaaaaggggaagagttgtccaaagtcatccctagttgacagaaaataagtgaaataaactattctctctttcccaaccatctacttggatctgaaaaaaatatttaaatgaaaagataaaaatgtgttacacattcataagctaggttccattatatttggttttttattaaaaaaaagaatatatcatggtgccctttctatttgtctgtgtttccctgtagtttttggtgttggtgctcttggattataaactctagatggcagtgattaagttaaagttttgtgcggtctctggaccatggtatgtatattgcataatacataataaacactatttgtaattataataagggtgagtctggaagcggtaaacaagggtataaaatacatcttccttatggttattattccatttatatgagaagtccactaaattcactgaaccatatcaggccacatctgtttgaaaacctaccagtttttacgaacattaaataaaactggttagacttaatgaccatttatcatattcatacaaaaatcatgaaatggaaacttagcagagaggaggccattgataaagaaaaaaagttttaaacaccaacaggtttgatatattattttttatatttaaaaaagtcaagtatcggctatttttgctccagaactttctgtaattggcgggtcttttacttttgctgttgttttctttcttgcctgagtattaacctaagtagcatagattcagaaaacatgcccaaaatatttatacatgtattttctcatgaaagttagatatttgaaccttaagagaaatagcttggatgaaaaattttaccacagggagaaacagcaaacagccttaaacagaatcaagataaagctgggggaggtgttggctgggaagagggggaggtgacaggaaatgaaaaaagttctcccagtttcattttataggtgaagtagattctacttggattagaccttctaagtgactatgacagagggtaaagagaggtggaaaggaaactttgagtgacgtttctgacagcaggctacagaaataacaatttgacagaaggggccatcataaatataagaacatctcaggcatgaataggacttcttaatgtaaaaaatatggagcatgtgtaggattcaatttggggtgaagagaagagccaggtgggaaggttacctagaagccagctattagtgttgaagtcaaggaactctggtatccatttaaatattcctggtgaacattttttggagattttgaagtatctttctcagttattcctatttatatctagttctagcttgattgactgagctgacgtgtaaccaataaatagagaagtttggtatttctataaatacaaagtttgtttttgtgccaatactggcatctatttatcctgcaggtagatgatagatctcgtttttgcctaattaaaacagacatcacagatcaagaacagatcttcatgtcagcaaacagaccaatcactctcttcttgttatttaataagagtttcattatcaatgtgctggaaggaaaaatattagtaaaaattctgcatatagtattataaatactactgtattatagagggcagaaaatgggaaagcaccatataataagaaaaattggcctgaagttaaaagctttgggatgttgtcaaaaaccagagctaactagttttatgaattggactagtcagttgccatcattaggcctccaattctttgctggaatgataagagaagttgtccaaattattcctaaagtccaccattcagctctgaaactcatgacaagtaaatattctattttgaattttcattaggttaaggatttaacaataagctgaaacaggatgactaacccataacatgttccagaaaaatacgaaatgacatgttgaagagcatttaaattgaacaaaacagatttgtgtgtgtgccactattgatatacaaatgttgaatgtgttttactgtatctactgaatgtgattgataggagaggcatcaatttcaaggtttgtgaatttaagtaaattgttgtcagtggtatagcttcttaaaaaaattatatctttacagtgaacagacaaattgagacaggatatacataaagcatcaatttagcacaaatatccacttacaattgtgaaatatatatatatatgtagttgggagtttttcagaaaatttgaggagcattttttaaattgcttatgctttttagaatgcttagcatttctgttttgaaaacaacttgtcttccttttcaaaatgtatgtgcgaagctggctctgatgtcagaatgaaccattttcacaggattgggtcagctcccactcaacatttcttttacagaaaagaagccggtgatgaggcagtatttgagctcgttaaatctcaaacccccagcgtcttttccaaagcactacaaaactcttacatgtataatcacgaggaggaaaagaagagaatatagtttgtctttaactaaattattaaatccttgttttgaccctttcctttctaccttgatgctttctgcctccacctttcatttaaatttcctcactttgggatgaaaaagcatgagtaagtgtggtgcataaaaaggaaaacaagcaaataaatagaaaacttgtcttttcatctctcccattgctgctttcttttccctctcatttctctctgcatcgaacttcaattgtgtctatttaaatccttcctatacccaggatattttaggtttccaatatttttaaacggaataaaaatagtttaaaaaatgttaaatgcatgtcacaaatattttacagaaaaacttgctttgaaacataagtgaatatcaagtcgggaaaataaaagttttcttcacaaaatctataagtgtcttccttcactttaaaaggtttttaaagcttatgaaggaagccactggaagcaagttcatgtttagcaagactagccaaaaaaagaaaaagaaaagaaaaagaaagaaaataaactgatttaatgggagcccaccctgggtctaatttcaaagtttccatttatgtcatgtcagatttggggagactgaaccctcattgaatgcactgggctgactctctcccatgcctgatacccagggttcatgactgcagttcctggcacagtcataaatattcatacctagactaataatttgcaagccaaattcatttggcttttttcacctcatcaatcttataattaataagggtggtgctcttgtttcactttcctccaaaagaaaagataaatgaaataaagagtcatcctgtaaatttaaataggagtgcctctcactgattaaaagctgatgctatcatataatggtggaaggggaggcttcagctatttctctcactggtggctggggcgaggtgaggaggtggtgatgggtaatgcaaaggaagcatttccagatgtggcagcatgagccttaatctgaagagtttggttatctattaaataatgcataggagaacgttgagatattatgttagaaaagagttgtaggatatatatttacaaattgcactcttacctagtattttgatagatggacacttaatgtagctggacattgaatgtagcatgccaatatccagagaattggattctgaacagcctgcagtttctgcctgcagtttagaaatttagacatattttagaaaattgttaaaatttgctgatctttgagtcttcaaagtaactgcctttgaattagtatgatagctgtgttcctaaatctaattggaaagacatggtttcctcaaaaacattaaaggaggtatatatatatcacaaaataattttacaaataaatcacagtacatacgacacaatgtaaattgtctgctcctattggattttctaagatcttttatagcaaagcaggagaatcaaattgaacataattttgaaataaaagtttgataattgagttaagcagcttgatcttgtcaatcacctgtgaccttaatctatttacacttcatttaaacattcaaaaagtcccaaggctcatggataagcttcaaagtatgaacaacggtcttcactctgttttggtgggcaatatcaacccttttgagcagattatttaatctgttttaaaattaagagacctggataaataaagaagcaggaaaagcttaactctgcagttaggtattcacttctaacttctttgagggtaacttactttaaagatgtgattatctgttatttttgtgtattggttagttagctttaagaactgttgatacttgagctattcctgagacccacctaatttatgtaaaggcaatggaaggggatactgggcactcttcatattctttatctttaaagcttgtatttaattgtttcattctttaaaaaccgactgtgttcagggcagtccctctttaaacatgtctaagtgcatttgcacaaaagatatattttacttcttaattctatgtgaatgcaattacacatgtgatttactgcaaaaaaaaaaaaaaaaaaaagaaaagaaaagaaaagaaagaaagaaagaaagaaggaaaaagaaaaactgctttcctccgctgacctttaaaagaggagggtaaatgagagagagagaagcaatactgactgactgggcctcctagtgtttccccgacctggtctagtcagcggcttccgggatgagaatggtctgagatcctagaggccgtggtgatctgggtaagtggcacaggtggggaccccaaggcgcctttacaaggagttctcagctggtgggggagctccgtccaggtttcttgtagaggtgtggagggggctaagagggaactatcttgtcctcaccctctgtcgaacccttctcaactttgcttggctgagggggatcatcttggaaaactcacggttaggtaataaagtctctttcctctcctactacttttcaaaagcaaaattagacccacttagagcttgtgggtgtttctgggtccttgctattgatctcccgggtcaccaaaacaactcagcagctcctgcaggtgtgtcctccgaaggcatgggaagagagatctaggaatggcagaggcgcagtgggagagaaagagagagaggggagaggggagagaggagagagactggctctgtcaccctttctcctgcattctaaatctggcttgagagagaggagagagagaggacagaggagagagactggctctgacagtcactcgttctcctgcattccaaatctgcttttggagccagaggcagccctccatcctggtgccacccaaatgctagactgctagattgggctgggcctgagcactgccgagcgagcttctctgcgggctgagcgcttcaggagttcgacgcggccgtcctcggcgcagactttctcgccggcggacgtgggctctggtgcagtcacactgtggcagctcggaggcgcccgccctacgctgcttctccaggtcctgagagtcgtggggtcctgaagactggatctcttcctaactccattcccaaaagcccgcgaagagcgtgggggagggggaaagtgaaaagcacccttcacctcacccaacccccacaccctctgtgagaggtggcactgcaaggcccacagacgggaggagccttgctccctggcctgctgcaccccagcttcctgtctcgggggagccagctgtgctcctcctcagccggtgggggcgggggggggaaccgaggggggtttgcaaatggatttttgcttgttttaacgttcttcccttttttgtgtgaatccagctgctgtggaggcgggcgcgggcggcggggtaggaaggactgggataggatcgggtcagggaagaggagacagcaattacagagctttgtggatgtttgtgagcacacgtgcctaggtcaccgcatgcgtgtttgtgtgtgtgtgtgtgtgtgtgtgtctgtgtgtgtgtgtgatggggtgggggagaaagaaagagaatgtacaaagctaaggaaccctagaccaaatcagtttgtggagctcagagacacgcatcaaacccagctactgtcgcctcacctaggggtctggaatagacacacctattgcttggggttcatttaaccctttttgtgcctcagtcccaagaactttctttgttttccagcaccggggagagaggctgtcgggaagagtggggctggagtggccgggcagaggttcacactagagagctgggctcaggggtgctgggctctagggtgctggctcagctgccagtgctcactcctctggccaggcggcctgccctgtctccaactctttcgtccaggtgagaatgaagggctttctttgcatcgatttgggttttctgtaagaagggaaattatgagttgtgatatttttattttttaaaatgacgcctgcttgagattctgttcacctggcaaagtgaagagtttgaagctgagaagagtttgaacaaatgaagctgagaagactttggacaacgccaaataaatactgtgaatgataacttgtgttaaggctaaaacttttgcacagtgatgggcactggctcattactgggatagaaatagccctcacaatacattgtctatgtatgtacacagtgtcctcagtatcttcaacatcccaattctcttgggtttcaaaaggtgattgggctgacacagtccaagagcctacttctgtgtgtgtttcagagaaatactttggattaaatggatcagcatgaaatacacaaagacaagcaaaatagaggagggggagaggaaattaacattaattctgagagaggtgaggagaaaggggaacagggagaaagagagggagaggaggagcaggagggagggaggaagagagagatttttcacacgtgcagaccaagggctttgaagccttcgaccctgacccccaaacccaagtgcatctcacaaaacaggttcggctcatatttcaggcggtctcctggccaggcgtccgcggtccccggggccttaattcactcctgccctctctgcacaatgactttcgaacctgggaaaataattgcattagagcagattacttatccgtctttttctgttcgacagaagtctattaaactcaacacagccattaccagctgagctctagagcgcgccttcattaagaaaattaaaatcatacttttgaacctaagcaacgcctgcgcaggtctcaggagtccgcgtcaaatccctgtattttcgagaactcgatttttccgcgaatcaatgtctgctttttggataccgtagatcagggtgtaaagattgagtgtgatgacaatttctcggaagatagggacgtctgagctctggaagtaccatctctcttctctatccctaccccctcctccagccgcctcctttcctggcgtggctcttttcccgggagctttccagttagaggctgcacacctgtccgggcgtgtcccgggatttgggtagcaggtgggggcggctgaggcgacatggaggggatggcgggttcagggcctgggaaccccgggggtgaacttcctcaggtgacgtctgcggccggaggcccgcaccgagtgcacgtgtttcacacacgcgcgcgcgcacacacgcaccagagcgcggcgaggagactgtccccctccattgcgtttcacagcggctccgggaccagtgtggcctgtgagccttttgtccatccgggcgtgggagcctggcctgggaacagggcaggccgttgcgtatgcctcggaccgggagcttcggtccctttggcggggtctttggcctctaggggcctatctgggtttccttcttggtttggtaagagcagcagtagcgccaggtacgccttggagactgtaggcggaatcgctccagctcctgctctctcccgcgccccagccccgggcggagggaacaggtgggaaccgcgggctggaaggagggagacgtcccctacctccactccggaagcctcggggtaacgtctcccattgctctagcggagttcagatctccaattccagtttcaactggaaccctcaccgggtctgtctgctcagttaggagggggtgcgtttgcattgattttttgtggcatctggaaatttgcggtgtttcaggaataaattttagcatgtttttcttttctgttagccactgccctccgtttctgcattttgttttttaaaatattaatgactgtgtatgtctctgaaaggtccacccaactcaggactctaaaggaaacataacggcttttgcacattttgggggcgtctttccttaggggtctaggagcagagaggtgctgcttccatttttgtcagaatgctcagtcatagagttctcaccccctctttctgtctaatacggctttggggggtttgtgaggggaaaatagcaccccctcctcctccctatcagcactcaaatacaggattaggtggagttacctgaaagtgtatatattgttccttggcaagtgtttaattctctttctctccatttctatctggtacaaatgcctacaaaactccattgacgaaactcaacaaatagatgtggacaagagaacatcttttacatctccacagctttcaactcgctaattggtgaatattaaaaatatttttccaggaaaaaagaaaaacaaacaaacacacctacactgctgttgctcgtgttttcttctcaccaaaggtagacacatcattggatttctttttcctttgtagcaaaagatgaggaaatcagaaatgaaccgcagccttttaacagtagcaattccaagacttttgaaacagttttctttgcttctgttttcccttctttgcccttaaagcaaaacaaaaacaaagacaaaaaaggaagaaacatcattcttagtgaagagtttattttgttgccacaataaagggatgggggcagttaacagctacttgagatggtaatgcttagtgatcccattcttttactcataatcttcaagtggtttaagattaatggcaaggggtgttttccgtctcttcctaaggaccttcacattaatttacttagaacattgaccagactgtcaatgtctccaaatttcattaagtcaaacagagacaatacaatgagatgatcatatttcctttatatgtgagagaaatatttttatttggattcaactgctatgagggacaccccctttcttgtctttattattttgttttctttgtacagatatgtagatagctatatatagatattttgtatatatacccacatacgtatatacatatatatttgaatagactcatatggtctgcagataacttcccttccacttctgagcttaacgaggacctttcaaacagtcaacccccgttgcaggcagtagattctgcttccccagagcaggatttatatttaaaatcagtttgaacccaatggacttcctcaaaacagaccccccaaaatgataacagcttggagtatcaatatttaactttacctcaattgtcacacaatagccccagcaaatcttcaaacacaatcagactgaggcatcacttcactggcctgaagaccgggttgtctcccacctctgccttgccctaggagcgctggttctagggagtcaccggggtccctgtcccctccctgagtgtctccaaagatgggaatgggggttggagaaggggtgacacagggcttctgggaagaagcgaaagaggagaatggatttttaaaccagaaagtcctgctactctggcaagaaattaaagtccagagacacacctttcccttgctgtcctccctgcccgtgttccttcccccgcgcctcatttctgagcactgttttaacaaaatcccaaaatccggtactttggaaagcaaaaccaaaaactccctcagaaacaaaagtcgttccgcggtgtagattgacactcgttatgtgggggtctggttgcggttggaagacttatccgagtcagggctgcattgccagcgcctttcccaagagtggaggttggcggtgcaggcggtgcggctgccagcctgagattgttccggctctcgttacctgtgcgccctcgcgttacatggtgctcataaatcccgcggcagattaactgggaaaccaagaaaatgcctctatgcaccgaaccgttgaaaaagaaccaaaattctctcaaatagtagcagtctcacaccttgcattggacgtgaaacactatagtaagatcaaatgtcaaagacatcggttattttggtgcacttcagctaccttttccgtttccagcaaaattgagaagtacgaccccaaaaagaatagacacacccatggaaaagacgtgtgtgtgtgtgtgtgtgtgtgtgtgtgtgtgtgtgtgtgtgtagctatggtgacaacttttaaacactttttctgcttaaaaaaaaagattcggacagggtctggtattgctttgcgttgcaggaaagggtcattctggacaaggaaccgtctgaattccgaaagctatccctcaagacttttctaaacagtgcgagtttcctgggagtttaattttgtgaggatgcaaaatattgctttgtattggcctctttccccatcagatatccatttttaaaacgtctacagcatctattaaaaacatttccttggactcggaatctgcagttctgcaggaaaaacaaactgtagcgaaaacgcagagaatacagagatgtagaaaaaggaaaggtgtcctctgccaaggcttttgatagtttattccccagaggccaagcgaaggtgggggggttccttcgcattttattattattattattatcatttattcatttaaatgttcagtccttgacaaggtattcccctgccgcggggttttgctggagaatggacgtgggggcggtggaaggagtcagtgaaaggtggggtgcgcagaaaaacaagattcgcttcgcagggggctgacccgcagcgttctgctctaattgccagcagggggcgctctgatgttagctctggactagacagcagagccactctgtgcttgcaagacaggcttggcagtttcacgcagctgcaaaaggaaagggaggggggattgtagttcctaaatcctcaacagctattccacttgggttatttaccctcggttcgaaatgcttctacgtctcactttacctacccatcccgcttatagtgcatcccgttccccatccacctctttcttttcatcggcatctacgcaccacatgtataatctctctctctctcgccttgaaatatacattaatgcaacttattaaatgcgacgatgaatagtcaacatttttttcgcctgttggttccgctgatccaagcaggatttatttgcagatctcacgtccaggagccataatgcatgatttttttttttccttaaataaaattggtcaaatgttgacaacctttgagccaatctaacactcaagattagtgatgggaaactaatgagaaaatatcagatcgcccagcctgagggctgccaattaaatcttcgctgattgaaaaataaaagcggacttggggtgtgagcccagctcaacttcatctattaatttaacatgttaccgggtttatgccttctcttctctaaacagcttcccgtaatacagctttctcctcttcatccctcaacctaaaagccaagtgttatttctcagaatatttcaagtggtccaaatctggatgatcatttcttacatggtaaatattaggcctttaagcaatatgatttaactaattagaaaatttacatcattaagtctcagggagagaaaaaaaaagagaaacaaatctgccagtcattttaaaggagacaggcactattgaagtgtgaagaaatcggctctaattcaaaaaggcaatcgggcagaaaaagccctcaacattaccctgctagttattaatcagaaagggctctctcctccccacacctcctcccttctaagcactgagtttaagttcgtttttttgtcagtggcccatgtcatatttatattgaggttttgtctgctaaaggattaaaatttgaaaatgtttcaataagaggcaaacagaatcctcaaagcgaaaaatatccacagaatcacctctcttccagacaagtaaacttgtaataaacaattctcacgcccctcttattttttttaattctttcgtctttcttcccattaagttcctattttgaaacctgcttggtgagaactagataaagtctttgtgttctgcccccctccccctcctttcttgcatctcctccctcctccaaagcgagaaacttagactgaaagcagaaaagtacaaatacattaacaaagccccactcacttgataaaaaggccatggtctaggcttacatgtcaggaatctaagggaagggggctccgttggtgggtctacagacagaaggtgatgaactagaaatttcccccacctatgtgtactattcaatatagtgtgtggttagagaaaaaggaaggcaggtgggtgagaattattttaaagtgtattgtggtgttgtgtggctttttctttcttctcctcttttctattcagcttaaaacagcagcctcattatatctaggtgccccttcccatcatactcttacttaagcccttggtacaccacacacatcgccttttccctagtcttctcattcccagcaaattaacagaagaaggaactgcaaaaggaactttgtgagtagttccatttggaaacccaggcccttcctggcatctctgaggatttgttcttaaacggatattggcctcaaaaaatgtaatagcaagccttagatattcaatttcccttcattattatttcttcttaaattataaagaggtcccaaaggctcatttttctgccttgtcctattcttctctaattatgttccctcctggcctcattttcttctcctcctctctgccttactttcttaaagtttcactaccttgcttcccatcaagtctctgggccttagaattctcaagtctttgggcttctgctgaccttgaacagctcccagcattaattcaatgccatattcctggttaccagatttcaactttgcaggagagagcagtagcagacctgggctattaacacaccacagttaattctctgcgggaacttttactaggtgggacttgtggaaggagaaaacgtctgtaaacagtgcatgctcctgagggtggggaatgatttctgatatagaagccagaacacataaaatatggccatattggtgaaagagccagttccgagttagcatttggttaaataaggagagggaagagaacagggggaccctgggaagagtttagaatgctccccaaatgcagctccttttctgaccattaaagagcagatgtgagtcgaacgtgctcccctttgagaaagattagagtaaaatggacccctccgtcactttcaggaggcaggacacagggaggtgaaaatatacaagacaatggcctctggcgctggtgggcttccttggcgggctccccaccttttgccccgtccctcttacaacccttcttacctttgttgcttcaatttgatatgaaaccatgggatgttcctgggctaggttcctcgagaggaaaaagaccacgagaatcaacccgtctcctgcatctactccgaagtcaagagcattacaatacaatttacagcgcctttaacaactcgcaagtaaagcattaaaattcgctttaattgagaaaatattgatttttaagtctagaaaaagcgaaatcgtaatttagcttcaaactttcaggcgagaatatagcgtattatgtcgccgtataatggatccaccctttccgcccatgcaacatcacatctttaattgctctactttatgaagtgataaagacaaaagataacccgacttaggcaaacgctttttaaaaagaggacctagaggaatttcttttaccagatacttgtagaaagaattatctccttttttgaagcagaaaaaaaaaaaatgcccaaaggggaggaaagaaataaaaaagaaaaaccacagactagtctgaaagcaactcacattagcaaatccgttgacatgctctaccaaaggagggatgaagccaacatttagagaaaatgcattcacggacagaattgcatcctcctttaaacgaaacaaacctgggtctattttcttactttactcctccgtccttttttggggtggggtggggggcgaggggagtcagagggggcagaatccattggtggacagggaagggaaagaaaatcaggctttctatgttatttctgtatcggtttttggtattatagaggagtaaagaagtttttgtgtgatggtttttcattgatcagtcactctgagctaatgtaattatcctcatcaataggaggctgcagagagaatcattatgtgggtgacattgataaatgatcgcccaggaacggccctctcgcgggcaacccccacgtctgaccctcccacacacacaatgtagtcatagaaacacctagagaacctcgagccccgccgcggaagaggcaggagagggaagaaaagcctcgggcggccgaggtgggggtgggggcgaaaggggacggccagccccagatccaaaccagttccaacgacaaaaacagccagcggcggggggcgaggggagagggacggtctccccacccggcggccaaccctcccgcgcacagttgctcacaacaaagtgaaaatccgccctccagacggacccattcctccacaccttttcccatgtgtgacctcactaccaacaacatctgatgtttgacgagacacatattcaaaggggtctctccaaaggagttaaataattaggtcacaaaacttgtaggcatctaattctcacgcgagtttaccccgctccccaaacaccaaacaaaccaaccaaccaaacccatctgaaagaaaacaaaggcagcatctgggcgacaccccccttcctgcgttccccccagttatttactgggtgaccccgtcctttctcttcacctcctcacccagcgcctcggattatgagataatggattttgcgattgttcttgtcagggaaaaaaatctccacagaaccccacgttttcatctttcaactgttttatttaagccaatgggaaggtatt

SEQ ID NO: 334 - DNA, 59383 bp, Homo sapiens
  source 1..59383: mol_type = genomic DNA
aggcattgtatgaatatgtttgaatgagaaattcgtgaaaatcaatttttatttatggtgaaacacttaacttggatagaatatgatataaatcaaatgtaactatgcctctggaggcactatgaaaaagggagtgttctagtttcatgaatttgcttttgttctgtgtatattgctgtagcaccatttttaaagtcctcttcttaatgagtgtctctagccagtaaatttcacacctcatgtgtgtgaagacaatttattgtgcaaaccaaggcacttttgagagtagattgggcagccattggttattgtgcttctgtgtcaggcatgcactgggactgtctcagtaaacggctacacatggccatcctaattacaggcagtttgggatgaaggactcagtgacagtgtggtattgggaggtgaatctgttgaagaaaaaaagcatgaaacataattaaacaggcaaggaaggctttattcaagactactgcagcaggggagagattaatcttgactctggttgcagcagggacagctggggatttatggccaatgggcatggcgaaggggtcagtggataggaaattactaagagaatttggttaggtattaagggtcgggggattcttgctgagctgggctctgccggccaggaccaggcctagtcaagaagaggcctcagaggaacatgattaaggtttggtcaaggaaagagtccttgttgaaactcaccaaatgaaatgcagattttaaaattcactcttaactaaggaagctgaatagtttcccagtcatgggaactcatccttgctctgagaaattcttccaactttatgctctattttctcctttgtgatttttaaaaaattgtcctttgtaaatctagttattctagttatgcttggtaaagaaatctattttatcttctgatctttgcttctacttcagtaaagctgtggtgaaattgactcttcaaaaatgaaaaaaagtgtggcttgaattgataaaggaagcacaattgtaattcattcaggaaggacttcatcaagtgggctatgtttcatggcacattgtttagtgaggcttagagaacagaagggaaagcaaggggcttatttttatggtttgtacacatgtccatcacagtggaggctcaatgaaggtatctgcttcccccgatagcccagtgctcactactagacaactccttccccctctgagcattggttttcttgtccataaaatgaaggtgttcgattaggtgagctccttggtaccttacagggatttaaaaaaattctgtaattctgatttttaaaattactctgtccctctctggattgtgctccaatattataaaatatcctcttgaggccattctaaaggattgaatatgagcaatggtaaatcaatctgaaaataatgacttaatgtagaacctgtgtctgaaaagctcagtatattttgtggtttatgatacaacacatccaaggagatgtatgcaagaatgttccagcagatttattaataaaagcatgtgtgttgggggagggggatcagcagaggaatagcaacaacctgaaatgtacttcagcaggagaatgaatacagaaataatgatggaatgactcacagtgaaagtcagctatagaatcaaagggcataaatttcaacaattttgagcaaaaacaagaaataacttataccatttacttaaagtgtaaagacatacaaaacagtactactactcatttctaaggggtacatacttgtgtatatatagtaaaagtatttttttaattcttggtggtgataaacaccaggctcagaatagaggttccctctgcgggtgggaagggagtatgatttgggaggggaattcatggagcttcagctgtatttgctaatgttttatttcttaaactgggagttagatatatatgtattcactgtattatactttatatcttttcatatgtcttaaaatataacaaccttatgataaagttgggataatcataaaaagagattgcatacatttgtttgcaaattaggaacagtcaccataatttagtggtagcaaagctaatgtgaatttgaaatcttcttactacctgtcctgcaattacaatgtacaaacatcaaaaaacaaaacaaaacttccagtgtacacactggtgaaagaaccactagtcagataccagtctcgagttgttactacttaattgctattgttatttatttaaaatttatactgtgtgagaaaagtgtttatgaaaacatacagttagctaaaaagttgtgattggatgccagattgataaatgagcagtttactctgcaaataagtgcaaactcagctatgagctttcaggtggtctagacaacaagagaaacctgcctactagtttcttagtagacaaccttatgataaagttggaattgtcatgaaaagacattgcacacatttgtttgtttgtagattagaaacagaagctctaatctacaactctcagtaggagagctggatttttcttggctctaaattttggggaagaattaatcacaagaatccttatgtaatgggtactgaggcattttgagtggtgcttctgttgatttgctcttggctgcagctccttgctattcatccatttcacacagcacccagagtgatcgtgctgtaacagaattcaaatcatatcaaccctccagaggcttcccattgcacccatggcaaagtcaagcccccttacctgacctccaggctccctgctcctgcctgaccatctcaccttgtctcttaccattcttctcctcttaattaggctccacccaccacagttggtgactcttcttcagagcttatgagagctgggcatatcctcttctctcatttaggaatgcccttctcccaagtcttggcttgtatgactcatctttatgattcaagtttccattcaaatgacattctcggtcccacccctcaaagaggcttttcttaatgagcaaaagtagcctcaccaccaccacctatactatccctaaacccaaggcaagaggggtgctctgggccctgtgctgtagaggggtaccctccagccacatcccttcccatgaagcacgaagtccatggagcaaaggggacttacacacccagagcttgcgtctcctctgctaggtcatgctctgtgctgtggcttgaatgtgaccccttcaaaattcatatggaaacttaatcttcattgaggtagtattaagagatgagattttgggaaagtgattaagtcatgagggcagagccctcaggaatggattaatacctttacaaaagaggtctcagagagataattgcccccttttgcccgtctaagctttcttcccctccagaggacacagcaaaaaagtgccatcttggaagcagagggagcagctcccaccagacagcaaatctgctagcaccttgacctggaccttggacttcccagcctccagaactctgagaaataaattctaatatttataaattacctcttccatagtatttaagcagcacaagcaaactaagatgccctgcttacctgggattccacaagtctctgcccagatggccccaagcccatttctacagtctgtgagcctctgccttggttccctttgtctgtattgtcagtttgcagacccctgggaagcccaagggtggtcacacagtggctgtttgcagaaggtatggataaatattagacataagggctgcagtatcatatgtgtacaagaacttcctctcaatgggagttggagccaggctgagaagagacgggcacaggccaggagacagggatcagggacccaagggctggcttgcacagcccttccacatcccagtgcagaactctgaggagtctgagaatcctgagtgcaaacttgttcttccaggtgtttgaaaagttgatttgtcaagctaagagggtagatcatattttattaaacagtttgttagcttgattcacactctttatttatacatatgtggatctccatttatactcttgccgcctctcagaaacgttagcagcaggcctggcttcctctgcatttgagtcactccagaagatggtggttcaaattccagggcctggtggttaaaaaaaaaaaaaaaaaaaggggcggggtctgtgccaaatctcttttctgacacccaccttcttggggattccagactttcttctcaaagtcctgttctctactctctctcctatttccctgtttttattttgtagcactgaaaaaaatctaaaattaccttatttgtttacttgtttaatatgaggtctgtgaggtcagaggcttgtggctacatctgcagcatgtggcacatactaagtgctcattaaaaatgtgcttatagccaagcatggtgcctcatgcctgtacttctagtgatttggggggccagcatgagaagactgcttgaggctaggagtttgagaccagcctgggaaacatagcaagacacccttgtctctacagaattttttttttaatgagctgggttgtggtggtgtattcctgtagtcccagctattctacagactgaggtgggaggatcacttaagcctgggaggtcgaggttgcagctatgattgcaccactgcactccagccagggtgacagagcaagaccctgtttctaaaaataatataaataaataaataaataaataattgctgaatgtgtcatgacaggaatattgttttaaaaaatttgctaaatgaatgacttaggtgctattttgtgccaggactatgcagggtacaaagataactcagaaaggtcctctgccttcaagggtcgccaagcctagttggggagcaatcttgaaaacaacagtcttctgcctttagttttacacttctgacatcattaatgaatctggaaacaaaaatatatatgtagccattattgtagcacttccgggcagacaaacaatttgcaaggtaaataagctgcagggaaagggaaacatactttctgttagtttctctaaaggtttagggataagagagcttttaaacttgatgacccatcagaatggtggaaagtgctttttctccctctccctgaagataaattgcttgtttttctaggagtgggggaacatgttaaacgttttctgctgttaagctaaaatactgtttagaacaggaggctaaaatctccttagctgctgctgtctgccttatttaacttacatggcagacggtggcatctgctgaacaacactgtgttggctgcttatctcctccaaggagttgagggactctggagtcgtcctcagaggactccatgggcagcagggcagctggggcttccagcagctctgggcagacttcattttcactccagatggcctgggtgtgcaaagtgtgaaagaagacaggcagaaacactgtcccttctgcatagaatccctttttaaaaattaattaaggcttgtgtctagtcacccagaaatataagaggtcatttttatctaaagatgattgtgcaggccccataaagccaatgcatttgaaataatgatgaatatatcataagaaatactgaaaactgtacttgtttggagttttatcttgaaaaacagcagctaaaaaccataaaagtgattttagagtttataaaattaggctataactttactatgtgctaattcttagaatactagggatgcatatattttttaataaaattgtatgacatcaccatattccttcctatttgactttcaagacatctactcattcatccaacaaatatttattgactaattactatgcaccaagcactgttctaggcagtgggatcagtcaaaaaaaaaaaaagaaaatatttttcgtgttttcatggaccttatattctaatgggtgataaatcataaaatattagggaaaagcagatcatgctggaaagtagcaaatactaagaagaaaatacaaaagcagagatggtgaataagtagtacagaatattggtaaagactacagtttaaagagggtggtcagaatatgtctctctgagaagatgacatgagggaaaagatttgaaggtgatgaggagagaaacatatgaatatccagagaaagagcattctagttagagggaacatcaagtgcaaatgtcctggagcaggatgtgcctaatgcgttcaaagaagagcaaggagccagtgcagccggaatggagggagtgaggggaggaaggtaggcaatctggagagatatgattggatattgtataccactggaaagacctttactctgagatgaagagtccaatagagttttgagcagggaagtgaaagtaggcttaccgtggctgctgagctgacaatagactgtagagtagtgagggtagaagcaggaaacgaatcgagtggctcctgaaagaatcaggtgggagacagagtagtagtggaaatggtgagaagtgttgggatcctagttacattttaaaaatggagctgatagggcttactaattgatctgattatgaaaggaactggactactagaatgtgagagaaagagaggaatcaaagataactcaggtttttgacctgaaaaggaactgagataaacagaaatggggaagactgaatagtattaagatattttagagggaagagcaggaatttgacagggcacaataattctaagattattacctactagacatccacacagaagtgtcaagtaggtagctgaatacatgagtctggagtttaggagagaagtgacaagtgcatatttgagaaccaacagtttaagggaggatttaaagtcatgaaactagatgacccaccttgggagagaatgtggatagaggacagaagaagtctagggatcagggagatatggaggaacaagcatagtcaaatcagagaagatcattttggggaaaatattggaggaccttgttaagtttcttggagtcttcttccaatttcctaaaatttaaatcatcctatttgaagagtctgtcatcattgttactgatttttcagttttttggtgattgacctaatgctcagatcctttcttatcaatgacagcacaagattccaacatggttttcttcacatagtccattttgtgttgctgtaacagaacaccacaatctgagtaatttataaagaaaataaatttgtttctcacagttctggaggctgggaagtcaaatatcaaggtgccagcatctggtaagggccatcttgctacatcatcccatggcagaagtcggaagggcaagagagaggggaaaagagagaaggaaggggggggggcaaaatcatccttttatcaggaacccactcctacaataactaaccactcccataataacagcattaatccattcataaggcagagccctcaagaccaaattacttcttacaggtcccacctcttaacactgctgcaatgggaattaagtttccaacacatgaaccttgggggacacattcatgcactatgtgacatcctgcatctgcaagttttgcagtgccattttaatgaagtcagtttactttgcacttgcactttgtgtttaccctgtcacagctcaccggtaacagaactcttagtgtgatggacagagatagaaactagcattcagcaaagaggcagttttcagggtggactaattttatacacaaccatttatcagtagatatttttaagttctgatgctttaaaaatccttgtaaatttgggggcttgagtaatgaatattagatgataatgaccttccgggtatccattaaaccattagcaatgtctccagtttgttaagaattaatagatattaaaaatcagaaggagggcagccaagatggccgaataggaacagctctggtctacacctcccagcgtgagcgacgcagaatacgggtgatttctgcatttccatctgaggtaccaggttcatctcactagggagtgccagacagtgggcgcaggacagtgggtgcagcgcaccgtgcgtgagccgaagcagggcgagcaaggcattgcctcactcgggaagcgcaaggggtcagggagttccctttcctagtcaaagaaaggggtgacagacggcacctggaaaatcgggtcactcccaccctaatactgcgcttttccgacgggcttaaaaaacggtgcactaggagattatatcccacaactggctcggagggtcctacaaccacagagtctcgctgattgctagcacagcggtctgagatcaaactgcaaggcggcagcgaggctgggggaggggcgcctgccattgcccaggcttgcttaggtaaacaaagcagccgggaagcttgagctgggtggagcccaccacagctcaaggaggcctgcctgcctctgtaggctccacctctgggggcagggcacagacaaacaaaaagacagcagtaacctctgcagaattaaacgtcccggtctgacagctttgaagagagcagtggttctcccagcatgcagctggagatctgagaacgggcagactgcctcctcaagtgggtcccagacccctgacccctgagcaacctaactgggaggcaccccccagtaggggcacactgacacctcacatggccaggtactcctctgagacaaaacttccagaggaacgatcagacagcagcattcgtggttcacgaaaatccgctgttctgcagccaccgctgctgttacccaggcaaacagggtctggagtggacctctagcaaactccaacagacctgcagctgagggtcctgtctgttagaaggaaaactaacaaacagaaaggacatccacaccaaaaacccatctgtacatcaccatcatcaaagaccaaaagtagataaaaccacaaagatggggaaaaaacagagcagaaaaactggaaactctaaaaaacagagcgcctctcctcctccaaaggaacgcagttcctcaccagcaacggaacaaagctggatggagaatgactttgacgagctgagagaagaaggcttcagatgatcaaaatactccgagctacaggaggaaattcaaaccaaaggcaaagaagttgaaaactttgaaaaaaatttagacgaatgtataactagaataaccaatacagagaagtgcttaaaggagctgatggagctgaaagccaaggctcgagaactgcgtgaagaatgcagaagcctcaggagccgatgcaatcgactggaagaaagggtatcagtgatggaagactaaatgaatgaaacgaagcgagaagggaagtttagagaaaaaagaataaaaagaaatgaacaaagcctccaagaaatatgggactatgtgaaaagaccaaatctacgtctgattggtgtacctgaaagtgacggggagaatggaaccaagttggaaaacactctgcaggatattatccaagagaacttccccaatctagcaaggcaggccaaccttcagattcaggaaatacagagaacaccacaaagatactcctcaagaagagcaactccaagacacataattgtcagattcaccaaagttgaaatgaaggaaaaaatgttaagggcagccagagagaaaggtcgggttacccacaaagggaagcccatcagactaccagcggatctctcggcagaaactctacaagccagaagagagtgggggccaatattcaacattcttaaagaaaagaattttcaacccagaatttcatatccagccaaaccaagcttcataagtggaggagaaataaaatactttacagacaagcaaatgctgagagattttgtcaccaccaggcctgccctaaaagagctcctgaaggaagcactaaacatggaaaggaacaaccggtaccagccactgcaaaatcatgccaaaatgtaaagaccatcgaggctaggaagaaactgcatcaactaacgagcaaaatcaccagctaacatcataatgacaggatcaaattcacacataacaatattaactttaaatgtaaatggactaaatgctccaattaaaagacacagactggcaaattggataaagagtcaagacccatcagtgtgctgtattcaggaaacccatctcatgtgctgagacacacataggctcaaaataaaaggatggaggaagatctagcaagcaaatggagaacaaaagaaggcaggggttgcaatcctagtctctgataaaacagactttaaaccaacaaagatcaaaagagaccaagaaggccattacataatggtaaagggatcaattcaacaagaaaagctaactatcctaaatgtatatgcatccaatacaggagcacccagattcataaagcaagtcctgagtgacctacagagagacttagactcccacacaataataatgggagactttaacaccccactgtcaacattagacagatcaatgagacagaaagttaacaaggatatccaggaattgaactcagctctgcaccaagtggacctaatagacatctacagaactctccatcccaaatcaacagaatatacatttttttcagcaccacaccacacctattccaaaattgaccacatagttggaagtaaagctctcctcagcaaatgtaaaagaacagaaattataacaactgtctctcagaccacagtgcaatcaaactagatctcagcattaagaaactcactcaaaactgctcaactacatggaaactgaacaacctgctcctgaatgactactgggtacataatgaaatgaaggcagaaataaagatgttctttgaaaccaatgagaacaaagacacaacataccagaatctctgggacacattcaaagcagtgtgtagagggaaatttatagcactaaatgcccacaagagaaagcaggaaagatccaaaattgacaccctaacatcacaattaaaagaactagaaaagcaagagcaaacacattcaaaagctagcagaaggcaagaaataactaaaatcagagcagaactgaaggaaatagagacacaaaaaacccttcaaaaaattaatgaatccaggagctggtttttttgaaaggatcaacaaaattgatagaccgctagcaagattaataaagaaaaaaagggagaagaatcaaatagacacaatacaaaatgataaaggggatatcaccactgatcccacagaaatacaaattaccatcagagaatactacaaacacctctacgcaaataaactagaaaatctagaagaaatggataaattccttgacccatacaccttcccaagactaaaccaggaagaagttcaatctctgaatagaccaataacaggatctgaaattgtggcaataatcaataacttaccaaccaaaaagagtccgggaccagatggattcacagccgaattctaccagaggtacaaggaggaactggtgccattccttctgaaactattccaatcaatagaaaaagagggaatcctccctaactcattttatgaggccagcatcatcctgataccaaagcctggcagagacacaaccaaaaaagagaatttaagaccaatatccttgatgaacattgatgcaaaaatcctcaataaaatactggcaaaccaaatccagcagcacatcaaaaagcttatccaccatgatcaagtgggctcatccctgggatgcaaggctggttcaatatatgcaaatcaataaatgtaatccagcatataaatggaaccaaagacaaaaaccacatgattatctcaatagatgcagaaaaggcctttgacaaaattcaacaaccttcatgctaaaaactctcaataaattaggtattgatgggacatatctcaaaataataagagctatctatgacaaactcacagccaatatcatactgaatgggcaaaaactggaagcattccctttgaaaactggcacaagccagggatgccctctctcaccactcctattcaacatagtgttggacgttctggccagggcaattaggcagcagaaggaaataaagggtattcaattaggaaaagaagaagtcaaattgtccctgtttgcagatgacatgattgtatatctagaaaaccccactgtctcagcccaaaatctccttaagctgataagcaacttcagcaaagtctcaggatagaaaatcaatgtgcaaaaatcacaagcattcttatacatcaataacagacaaacagagagccaaatcatgagtgaactcccattcacaattgcttcaaagagaataaaatacctaggaatccaacttacaagggatgtgaaggacctcttcaaggagaactacaaaccactgctcaatgaaataaaagaggatacaaagaaatggaagaacattccatgctcatgggtaggaagaatcaatatcatgaaaacggccatgctgcccaaggcaatttatagattcaatgccatccccatcaagctaccaatgactttcttcacagaattggaaaaaactactttaaagttcatatggaaccaaaaaagagcccgcatcaccaagtcaatcctaagccaaaagaacaaagctggaggcatcacgctacctgacttcaaactatactacaaggttacagtaaccaaaacagcatggtactggtaccaaacagagatatagatcaatggaacagaacagagccctcagaaataacgccgcatttctacaactatctgatctttgacaaacctgagaaaaacaagcaatggagaaagaattccctatttcataaatggtgctgggaaaactggctagccatatatagaaagccgaaactggatcccttccttacaccttatacaaaaattaattcaagatggtttaaagacttaaacattagacctgaaaccataaaaaccctagaagaaaacctaggtattaccattcaggacataggcgtgggcaaggacttcatgtctaaaacaccaaaagcaatggcaacaaaagccaaaattgacaaatgggatctcattaaactaaagagcttctgcacagcaaaagaaactactatcagagtgaacaggcaacctacaaaataggagaaaattttcgcaacttactcatttgacaaagggctaatatccagaatctacaatgaactcaaacaaatttacaagaaaaaaacaaccgcatcaaaaagtgggtgaaggacatgaacagacacttctcaaaagaagacatttatgcagccaaaagacacatgtaaaaatgctcatcatcactggccatcagagaaatgcaaatcaaaaccacaatgagataccatctcacaccagttagaatggcaatcattaaaaagtcaggaaacaacaggtgctggagaggatgtggagaaataggaacacttttacactgttggtgggactgtaaactagttcaaccattgtggaagtcagtgtggcaattcctcaggcatctagaactagaaataccatttgacccagccatcccattactgggtatatacccaaaggactataaatcatgctgctataaagacacatgcacacgtatgtttattgtggcactattcacaatagcaaagacttggaacccactcaaatgtccaacaatgatagactggattaagaaaatgtggcacatatacaccatggaatactatgcagccataaaaaatgatgagttcatgtcctttgtagggacatggatgaaattggaaatcatcattctcagtaaactatcgcaacgacaaaacaccaaacaccgcatgttctcactcataggtgggaattgaacaatgagaacacatggacacaggaaggggaacatcacactctggggactgttgtggggtggggggagtggggagggatagcattaggagctatacctaatgctaaatgacgagttaatgggtgcagcacaccagcatggcacatgtatacatatgtaactaacctgcacattgtgcacatgtaccctaaaacttaaagtataataataataaaatttaaaataataaataaataaaaataaataaaaataaaaatcagcttagaaattgttccagaagttaatgtcttcatttataaaggaagacagtgactggcctacagaactgagtgactagactgcacagctagctaggagcaaagcctgaatgagaatcaatctgaaccccccctccatgtagtgccatttagtggttaagatacttaacatctgtgcctcagtttcttcaactgtgaaacaggagttatatcgcatacctcatatgattgtgtaaataacacattaaaaaatagatatcaagtgcttggcataaattttttttctttttttttgaaacggagtcttgctctgtcacccaggctggagggcagtggcgtgatctcaggtcactgcagtggcacgatcttggctcactgcagcctccacctcctgggttcaagcaattctcctgcctcagcctcccgagtagctgggactacaggcacacgccgccatgcccggcttatttttgtatttttagtagagacggggtttcaccatattggccaggatggtcttgatctcctgccctcgtgatccactggcctcggcctcccaaagtgttgggattacaggcatgagccacggcgcccagctggtttttttttttttttttttttttttaatactaagtctggcaaggatatggagcaactaagactgtcatacactgctggtgggaatgcaaaatggaacatctgctttggaaaacagttgagtggtttcttcacacttgatcttcaccaaacggctgagaagcaataagcagtttcttataaagttaaatatacacttaccatacaacccagaaattccactcctaggtatttatccaagtcaagtgaaaatatatgtccacacaaaaacctacatatgaatacatatagcaactttattcacaatcttcaaaaactaggaacaacccaaatattggtcagctatgaatggataaaccaactgcagcacatccgtacagtgaaacactgatcagcaataaaaggaacaaattataatacacacagcagtttagatgaatctcaaagatgctatgttaattgaaaggcaccagttctttaaaagctgcattctgaatgattccattcatatgacattctggaaaaggcaaaactgaaggaacaaaaacaggtcagttatcaccaaggggtggagggaggacttggttacaaaaggatatgagggaattctggagtgtgatgaaattgctctgtatctcagttgaggtgtgagttagatggctgaatgagtttatccaaactcatagagctgtacattcaaaagaagaaattttgttatatatatttttttatcaatttaaaaaatatataaaaaataaaagagggaatcccaaagatgaaataaaaacaaaacattcctgggacttaacagactctttgaaaaacaagttttcttctattttcccctcctttccctgagaaagaattactcatgattgaaagcccttaaaaagaatttgcttactcagatattatttttaaaaggagtgaaattcatgactcacaaagtgtctattttcttctggcttttaagtcattttttacttcattttttcaacaaataattatcgatcacctataagcaaagaatgtcttcctgagctctcacttataattgaacatttagagctgaaggaatccttagaaatcagttagtctacattgcagatgaagtaactgaggctctgaaaagtgaaagtcactcacccagtgccacccagaaagttggtggcagaatcccagccagcacttagagtgtctaacggggcttcggtcttttcactgtgctcatctttgcagcccctgaaccttatcctaagaagctaacagctgctttgagaagtgatttcttcagctgtgtgaatgtacccttcactggtgggatttataaagtgtgatggtgggggtacagggaaatatttgggacaaagcattgtattctgagcttctggaaactcacttcacaagctgcttcccttccctaagaggagtccttgtttcttacagtaaacaggaacaggaacagattgcatggaagaatcattagtaggcacctggaagtggcaagatccctctcctgttactatcaaagctttgtttttacccaagagcagtaagaaccttcttgaactggtgtaggtggagctctctaataataccccaagataatgaaagacactactcctgaagtcatcctttaggctaatacataaaaggatggatgaccagagggtaagagctggtaaatcccaaaggcgtgagcaatgcaaattgagggacattctagcatccagatcattgaaggaaactaaagagacatgacaagtaaatggaactcatgattattttgaatgctttgttatcaggcagtgttattggacaattgggggaaatctgaatgtttccatatacaagataacagaatcagatctattaatgtgaatttcctgattctggtggcagttttgtggttatgtagaagtgtttttattcgtacaaaatacacacaaagtatgagtgggggacattggggtagcaacttattctcaaaagactcagggacaaaatagttctttatactattcctgtaacttttctgtaagtatgggattcaaaattaaaataatatttaaaatatgaggacattttagatattatccttataaaactaagcagctatggctgtattctttagagcccttattagatagagataaataattagagggtacacagcatagtctataattgatgggcaaataagtagatgtgataaaatgtatttttttataaatgaaaggtaagcacaggaagaggtaataaaggaatttggaggatgagagattgagtttggaggaaatgggcaggggagagaagaagagctttcttggtgtttaatagtttttcatcagcaagggagtcagccaaacacgtattcgggatgtgaccccaagcagttcaaattttggaacattagggaaccttccttcaggactcctgtgtcaagggaccattatccagcccaacgagcactgtcctgagagtcctgaaacctggactctagtcccctatttgtccccaactgccaattcaatcttgggcaaaacaacctgtaaatgaagtatttggactaaaatgatgtttgacaatccctaaaaaacttaaaaggcttttgtttcttgaagaaaatgataaaatttagaaaggaaatgcaccatagaaagaaatagaaaacaatgaaaatataaattctttttatttgagatacccagctaactaaaggaatagttcctgccaccccatgtccctctctttgaaaaaggaaacataggaactcttttaatttgaacagcacagagaatactgccctcccttctcacatcttagataacagcaagagagtcctcttaaattgaatttctatttatgaatctaaaaattcaaatgcatcattgcagaatatagtgtgttttccaaatatcagaataaatttacacggcaatattccaagactagaacacctatagcttttctgtcagcctaaaatgagtttgtttatggaatgactgattttgtttttgacccgtaatttatttagaatgtattattttaaaatttactcacatgtgtaaatgtttaatctttatttttattacagatttctaacaattttattgtggtcagacactagattttatatgaaaccaattattcagcatttattgagggttaaattgtctagcacatggtcagttttcgcaaatgttacatgagagcctgggaagaatgtcttgctctatgtgtatctattaagttcagcttattaagtatgttattcagatattttctatcattactaatattttgaatgcttcacttatcaataactgagcaaggtatattaaaatccagcattgtgagaatatatctgacagtttctctttgtagtcctctatgtattttgattctgttttattagatgcatgctcatttagaattctttttttcttctttgtgaattgaattattatgtagtgactttctttatctctaataatgcttttttaacttaaaatgtatttttatcatattaatatggctaccctagatttcttttggttattatttgcctggtagctttgtcaaaaattattttactttcaatctttcaatgccatcatgttatgggtatatttcttgtaacaacacctagctggattttgttttttagtcagtgagtctagtccatttacatttattataattatgaatgatggtgggtatttaagtcacaattaaaataatccttttagaaatggtttttaacagtatattaaaccaacatttgcactcaggatcctgcccagagtgaactgagaaagagggaagtgccattgacagaaagaggccttcaaggcacgtgctctatctgggcacgctgcaggctatggaagcctctaccagttcacctgcctgcttctggagagagagctgttctgtctttgcccacctgattcagagacagccatttgaaacactacacatggagaattttaaacctctttctgtaaaatgtatccttaatgaagattccggatgcttgttagcaccaaatgattgttgaaatgacgatattaaaggtaaaatacattgtaccattccattcctgcagtgactcacacatatttgatgtgcagggatttcttacattccacaaaatcattttcagggtttccttaaactatgcctgtgttctcttaaggctttctggtaaaccaggttttcatgattatttctaagaaattacatgtttttcactcccactgtgtcactagtctcctggtgtcttttttttttttttcaaattcatccagagaagttaaaaaatctaaaatagtatcttaaccaagatagagctacaaaattgtttgaggcttccagtttaacagaaataggattgctatgcaattcaccactgagaaagcaacaataacgtacatgatagtaaataatacctagcatgataagaggtgtgtgtgtgtgtatatgtatgcatgtatgtctgtgtatgaaatccccacttaaatataagaaaccgaagacatagaaaatttaagtattttactccattccgatactataacaaaatacttcaggctggccaatttatacacaataggaattttatgataaatgacttttacctcaatttttaaaaaagaaaaaatatatgtatacaaagaagtgaccaggggaattggccatatgaaagtcattgataccatagtgagagtagtttcagggaaaaagagagggccaagactcaagaggagtggattcagaaagagtgtgcagtaaaaaagcaacaaacataactctttcaagaagttttgttgggaatagagatcaaagtgatgggttgagaaggggatgagccttgggggatgtggaggttaaaggaggttttattgtttaggaaaagatatagcaggtcatgtgtgtaccctaacaggaatgatctagtagaggtagaaagtgattgtgaggtaaagagagaagatgactgcaggagggaatgtcactgtgatggtgacagaggccaggatccagagcactcaggtagagttttgtctttgataggagcagggaggatcccttaattaggcacagaagaggaggccaagtatatagttactgatccaaataagtgggcagtttgaatactgggaaaatggaatgtttatgtgattgttttggttttccatttgagaaaacaggtgaagtcattggctgagaactagggtgagggtccaaccttacattctccttccacactgccctagtagagtatctctgtgagggcttcaccccagcagcaggcttctgtctgaacaccaggcttttgcgtacattctctgaaacctaggaagatgcttccaagccactttcactcttgcattctgtgcacctgcaggcttaacaccatgtagaagctgccagagcttatggcttgcaccctctggagctctggcctaagctggacctctttgaaccaaggctgaaaccagagcagctgggatgtgaggagcagtgtcccgaggctgtgcagggcagtgggtccctgagcctggctcctgaacccattcttccctcctaggcctctgggcctgtcatgggaggggctgccatgaatatcactgaaatgcctttgaggcctcttcctcattgtctggatatttacacttaacccacttttaggtatgcaaatatctctagcaggtggttgctccatagcctgcttgaatttctctcccccaaaaaagctttttctttctttgtcacatggctaggctgcaaattttccaaacttttatgctatccttcccttttaaatataaattccaaattttgtcatttctttgctccaatatctggacataggttgttagaagcagccaggacacatcttgaaggctttgctgcttagaaatttcttccaccagataccctcaatcatcactttgaagttcaaacttccacagatccctagggcatagacagaatgcagctaagctctttggtaaggcataacacctgtgacctttgctccagttcccaataagttcctcatttccatctgacaccttgtcagcctggacttcactgttcatatcactatcagcattttggtcacaaccatttaaccagtctctaagaagttctaaacttttcctcatcttcctctcttcttctgagccatgtgaattcttccaatttctgcccattacccaggttccaaaggtgcttccacactttcaggaatctttatagcaatgcccctctccttggtatcaattttctgtattaggctatttgttgcattgctataaagaaatatctgagactgggtaatttataaagaaagaagtttaattggcttatggttttccagcctgtacaagcatagcaccaacatctgcttggcttctgggaaggccttagcgagcttttacttatggcagaaggggaagtgggagcaggcatgtaacatagcaaaagcaagagagagagtggggaggggagaggtgccacactttagaataaccagatcttgtgagaattcattccctatcacaaggacagcaccaagccatgagggaacagctcccaagacccaaacacctaccaccaggccccaccgccaacagtggagattacaattcaacatgagatttgcacagggacagatatccaaactatatcagtcccttataatccttttttatttctgatgcatctgttgtgatgtctccacttttatttctgatttgatttattatttgcatcttttctttttttcatagtctagctagggctttgtcaattgtgttttgtttttcaaatgaccaactcttggtttgattaatttttttctatgttttttattccctatttatttttattctgatcttttgcaaaaataaattaatgggagtatgtaaaactaaaaagattctacacagcaaaggaaacaattaacaaaggaaaagacaacctacagactgggaaaaaatatttgcaaaccacatatctaataagtggttaatatccaaaatttataaaaactcttacaacttaactgcaaaaaaccaaataactcaatttttaaaatggccagaggatctgaacagatatctctccaaagatgacataaaaatggccaacggatatgaaaaggtgctcagggtcactaatcattaggaaaatgcaaattaaaacctatgaaatatcacctcacacccctaagaatgtctgttatcaaaaagaagaaataacaaatgttggtgtggagaaaagagaaccctaatatatactgctgggggacagtagactggtacagccactatggaaaacaatatagaggttcctaaagaaattaaaagtataactaccaatgacccagcaatccctcttctgggtatatacccaaaggagaagaaaataccaccccataaagatatctcccatgttcattccaacattgttcacaatagccaagatatggaaacaatctaaatgtctatcaatggagaagtggataaagaaagtgtggcatatatatacaatggaatattattcagccttataaaaggatatcctgtcatttgccataacatggatagacctggaggacattacgctaagtgaaaaatagccagacataggaataaaaatattgcatgacctcaattatatatggaatatttaaaaaaaaaaagagctcaagtacacagagatagagaatgaaacaacggttacctcaggcagggttggtaggggagaggaaatgagggaatgtaggtcaaaggatacaaaacagtagatacgtaggatggacaagtctagagatctaatgtcaatatgaggactaaaattaataaaattatattgtattgggaatttttgttaaataagtagattttagctgttcttgtcataaaaaagtaactatgtgaggtcatagatatattaatctgcttcactatagtaaccattttattatctatatgtatcccaaaacatcatgttgtaaacctcaaatatacacaataaaatttaaaaatcaaaaataaaatattttttaaaagaataaaggaaaacatttgaagtagtcattttgggaggaaaataaacatactggggaaacacggtaagattgctgggcagtgctgagtgccattctgaatcaagattatcatcttaaatgagagacttggtatatttggatgcttttctccataaatattctcttgtttgggtacagccatggagtaggtatacgactgagtttaaccattaggtctttgccaaacaaagggaaaggggtggaaaaagtcaaaggtatttgcgagataatggttatgatgatgggccatgaaattaactgtgaggaggtaggtgaggagtgagtatatgaggttacaaaagaagtgagtaattattatcatgggggtagagtcgaagtgaagggcaccatgaagtggaagattagctggtaagtatggtgggagggcattgagggggtgattagagagtaggaggcttgaaatcaatttcagaggtcatgtagtcattggcactgatgaggtcaattgatatgatcatgggaatgggcaactcaggtagggtaaaagaaatgatggctgaatgcgaggcagttcaaaaccagagacagcaagaatacagaagttaagaatgatgacaagagtacaaggtggaagaaagagtgggctagtcactgaagtaatcagtgtatgaagagaatgaccagggtttggtagatgtcagcaaaagaaacacctggattttgtgggggtgactgaggtgactagggatgttaggcatgctggaatcagtcctgacaatctcatgacagaaggtgggaaacttattgtggagcctagggctgctggtttctccagcatctggtgttttaagatcagcatttgagtccaaactctaccacactaactgtgtgagcttgtgaaaggctacgaaaaacctgcttattctcatctgtaaaatgaagacaaatgttcaatgaattgcctagttcataaggagcatttgaaataatgaatgcaaaagcactttgcaagctctaaagggctatagaaatgttagttaaaattaaaaatttatgtcttgcattgtcatgaccagcctttaaaccagagctagaagaattacctattcatctctttatcggccacaatacgtaacacatatcctatgatttagagattacaagcttgaataacactgaacaataaaagcttataaaatgaatgagtctgtgactaatgtctccaatgttattatcaacattaccatcattactgttaagcattaatgcttcaaaaattgtgaaaaaaggccggacacggtggctcacacctgtaatcccagcactttgggaggccaaggtgggcctgtaatgccagcactttgggatcacctgaggtcaggaattcgagaccagcctggccaacatggtgaaatcccatctctaccaatattacaaaaattagccaggcgtggtggcaggcacctgtaatcccagctactcgggaggctgaggcaggagaatcgcttgaacctgggaggcagaggatgcagtgagctgagatcacaccagtgcagagacttcatctccaaaaaaaaaaaatacacatcctggtttttctttttaccaaatccattgaaatgaagaaaaagtaatatttcttcaagttaaagtcacacaaatatttatacactttgacctaataatctcattcccataacatttttatcatttaatcaagcacaacatatatttactcttttctctgttcttcagagaaaagtgcagaaaccataagtacacatataaatttttagagtgaacacacacataatagcccaactcctaaaaatttgatgtcataaaatattcccctaaaatgtaaaagcctaatatctaaagatgaggtattcacactatgttatagtgcaaaggagcaaaaaaaagctcattgtttggtgaagggaaaatggagtaaatattggcacataaattcagtggaacaatatggagccattaaaaacgacaaccgtgaagaaccgcaaaacaaaatccaccaacttgaatgcccttgagttaagtgggtagaagaactatgagaaggagcctggtataagatgataaaagataggggaggtaggtcaaagacggtcagaaaatgcagagtacagagtgcttgcaggccccacataaagacattcacattaaaacatttaaaaataataaaggaagataaaacatggtattgaaaaacaaaacatgttatggaccaaatgttgcccataggtctttagtttgtgaccctttctggagatagaggaaaatagtcaacggtgaaataaacatactagatatggcaatatgattataacataaagattatgttgacatatggacaatcactggaagtgtggaaaaaatgaatgtcggccttggtggaaacttggccaaataactttaccccttttaagcctcagtttcttcatctgtaaaatagggatttaaaaaattgcctccttcgtacagctgttgtaaaggttaagtgtgattgaaagggcaaagtgagtagaaaaggacctggcaagtggcaaacaaaactattctccccctcattttcctcctcctcctcctcattattattttgttattattaactatttctgcattttatatcccaccatcctgtttccctttgttctactaactccagccacaatagctttcttgttatttttccaatatgttttagccttagggccaaaattcttttgcccctagtatttgtcttacttcctgagagcttttgctcaaatgacacttcctcagaaggattttcctgtccgcctcaccctgctttttcttcattgcacttagaaccatctgatatcttatgtgtatatgtgtatatatacatacgtttatataaacacatctgtgtgtatatctgtgtattatatatatatacacacacaagggcaggactttgcctaacttgtttactgctatattcccagttccttgaagggtacctggcacataatagacattgaggcattatttgttgaatactgttaaatgtttagggtggagatattgtgccttttcttccccctttttttctaaatcccagaatgacaatgtttgtaaaatcaatgatttaaaagcacattttcctgcaggtgatcttaatgtgtaactctttgtaatcttttgtaacttttttgacagatcagccatgcagaagctggggacagaagtatttgaagaggtctataattacctcaagagagcaaggcatcagaatgctagcgaagcagagatccgcgagtgtttggaaaaagtggtgcctcaagccagcgactgttttgaagtggaccagctcctgtactttgaagagcagttgctgatcacgatgggaaaagaacctactctccagaaccatctctaggcaactatcaaaaagaagcagaagttcaagtggacaaatttatgtgaaaattcatttaacatataagctgaactctattatggggaatggatacaaaagcagagctcccatcttgactttcaattcctcatcagaagtactggcttctttagagagtagtaagcatggctgcctatgcttggagtcataagtgttatttggactataccctgagataagcttatagatcaagtttggctcccttgaaaagcatttctctcatgtgcgccctcagggcttccagcaggattgagtcaccctgacgatgaccggggagaagccgtgtgctcttcattattttcagctggaggacagagctcagtgcctgactgcctagggtctcatggactgtaggcagcctgccagtgaaggtcactggactctagcctacaacatgctgagctacagcccagaagccagacatgcctgtcttagctgacctgtttttggtccacttttgcccttccatgactaataaggaagatatgtgtgtatttcatacacacacaaggacctggattaaaaatccaaaaagtgattctcttctatgatttatttcaaactcatccatagataattcaagatttgtattcaaaataaacatagttttcacagttacaaaataaatcacctattttatcttttccttatgtaaaactttcttattgaatgtaacatatccatcctttgataattattacttagagccagtaatatttggttaatttggtgcctgttgggtactagtactgtgcttagtagtttaagggccttcattggatcttttcactaacttgagagagatagagtgaaagagagagaaagagagagagagagacaacagagaaagagagatgctcaggttaggtaatttgcttagtcactcagctgcaagaagcagagttggcatttgaaactaggtctgtcgcattccagaatccatactcttaaccagtgtctatcagaattttcaaccatggaactatattagatttgcttgtgaagctttttaaacatagacacatttaaatatactgttaatgaaaaaattattgacacttattgaaatggcaaaaagactgtaatcaggactattttgataggtatcaacaatattgcaatatgggagaggcattgggctcaactctgaagtttctttgctgaagcaaagaaaactagagattaatagccaattagcaggatacgggccttggtggatggaaaatttctaaaaggagtattcaaaggttgggggttgtattcatctgtttagtgttgccataaaagaataccagaagctgagtaatttataaagaaaagaagtttatgtagctcacggttttgtaggctgagaagttcaacggcatggccctggcttctggcaaaagctgttgtgttccatcacaacacggcaatgaaggggaagtggacaagtaggaagacagagaaacctgaggggtgtcctggcattataacacccaccctttggggaaataatccattccttcaagaaacaatccagcctagagagcaagaactccagagcagtagcaagctatttttcagggtgctcccccataatccaaacattttccactaggccccacctcccaacatcaccactttggggatcaaatttcaacataagttttggagcaggcaaatattcacaccatagcagggagattcctgctaaactgacttaagattcccactggaggaaggccagggtcatcagagattgagggcaggtgatgaggaatttgatcagatactgagggtgatcagctatcaaatgtggggtattctcaataaactgactttaccagaattcttgctaaaactgggtttggcaggctgaagacagagccaagaatgaggcctcataaaaaagagggctcaaaagagcctgtctaaagtttggtcgaggagataatctttgtcaataccaagacccaccccactcccttctctgggaagacaaggggctaaaacatatctattgtttcagaactgtctgggtgaatttgatgcccacagtactgttattcacttttcagcctcctgctgatgactgaggaaactaagagagtttctttatcttactaacttgttttcagtggtgctgtgcttcctgcatgatgcactcttttagaccagtgattcccacatttgagcatgcattcgaatcacctggagtgcttgttgaagcatagattggtggattccatcaccagcatttctgattcaagagatcacggtttctaacatgtttccaggtggtgccagtgccactggtaccacacagaacaattgttcaagacctttctttctgttgtctctcttctccccctccctctttttggaacagtgttttggctgctcttaattgggggcttaattaatctcacatcttggaaggtggtatgaggacttccaagaagggtccaaagacttcaaatgcttcacagtgaatataagcaagtagtgactggggtggagtggtaggtgagtcagtgtgaataacttgagagaacttaatgggcttattttaaggacaaaggggcatggccactgtgccctaacactctatcctgtggcttcacttctatccctgcccagcaaccaaaggaaccacccaggtgaacccacaatttctctagtgctcaagggttatgaacatcactcttctgagttcccacaactcccttacactatagagaggttttgggggctgcacaaaacttcattctgcctcttcccaaagctaatgatgcccattctcaccctctctccctgcatactggagaattattcctggctgggaggctgggggtcaggagcatgtctgtgctctcacagcccctgtgtctgcagcaggaaaagcagacctcaaatactgcttctggaggtgggatctgagacttttcagaatttggaacttgagtgtgtttcccaggtcaaaatctacgacccgtggttgttgccatggtagaacactgaaaatcaggtttgccctgggaaacctaggatgatgggggcatgtgaccacactgctgctgacagcaggcatgcaaattgccatcacattaacagggaagagacctcaccccagaaaatgctccccagagctcacatgcccttttgtgaccaaccagattgcaaatatgactggaagagcggggaccataatattaccccagttaataaaaattgcccaatcttcttgtcgatggtttttataacattagaacagaacaaaacttgtgtgctgggtcctaagaggaaatagctagattttcaaatagtttctttcacaaacagattcaccttcctatcttgcatttcagaacatggttcttagaagacaggtgcagactaaaaacagcttactctccagggatttgtgttatgcacttcatcaggctcaaaagaaaaaagagctaggaagaaatatcattttgaatcatagctccatgcctctaaagagaagctcactcaagtttactttcatttggttcactggggtgggagtggggaagaagatttaacattacttgaatgttaaatcttttacttatcaccactgagaaaatgctttctctttcagctgtactcagtcttaattttgaaccacttcaaattgtattagtaacgatccaactgcaagatggtgggggaaattgactaaggagttaaactaggaagtttcttgttatgaaacagtcacaggtatgagcaaataaagggatcctgctagcttgctgctttgtaaaaaaaaatatatatatacatatatatttcaaaaatgccagttgacctttctgctttctatttatacagaggaaatgccaccagctattttgggtgatgcagagataaagcacacaaaggagagtgctggaagttaattatttaatgtctttggggctgaagttggagcaaagccctaggtatattttaagagtccagccatcacagtgggctcagagtaaaggaggctgacaaattaagcagtagctcaacagggggaaatataccacattcctctttcaagatgatgggttcactagctagtgtatcagaagggaatggggccaggccactaaggtgataaacagaaacaggcaaagagaaggagaaagtgtggggctgggggaaggagagaggcacgggtggacacagagcaaaacaaatgttttaaagtacttctgccacacctgtgtaaggaaaaaaattgaacttgatagcagatgacttggattccaggcctactcttaccatttactgtgtgatctaaagcaactaagtgatttcccctgaatctgtttcctgcctgtgtctgaagattgctgtaaagaataaataatacaataggttgaatcacatgaaattgccaccgtgattcagcctaatgtgtagaagtgctttaaatgccataaaatgttctcaactttgaggaaaaaaaatcattaaatgtattatcaagctacctcatcttccaccattggagattcatccctgaagactcccttaggtttctaggcttctataattaccatccaaatgcaccctgaaagataaacacttttagccattttcagctagcacttgaccagaaattagctgagagccagctaagagctgacagaaccatgaggaagacagctctggaaggcaagtcagtggactctccagaccagccttgctttctttcagtgcctcaactcacttcatgagtctgcaacaccacagtgttcatcattgccagaaatcttaggatgctcaagttttttccttaactttagaaggaagttcagaaatttggttcaacaaatatacattataaaataatacacaaatattcactaggagtaccacagttattaacatttatacagaattgaaaacttgacaccaataggaatattttcttttttatttcatttatttgtttatttttgagacagagtcccattctgttgcccaggctaaagcggagtggtgcgatctcggctcaccacaacctccgcctcccggcttcaagcgattcacctgcctcagcctcctgagtagctgggattacaggcaagtgccaccacacctggctattattttttgtacttttagtatagccagggtttcaccatgttgtccaggctggtcttgaactcctgacctcaggtgatccgtctgcctcggcctcccaaagtgctgggattacacgcatgagccactgcacctggccccagcaggaatattttcaaagtagatttttaggtttagttcaggagacaatctttcaacagctagaaacattctttttccttcccaaaattttgtggcttttcccactttgatagtttgaatttttagtcccaatttacccctccctaaacccctgactattgccttataactttgtagttctcaatatttccccactccttgactctgagtttggccatggaacttgttttggctgaggaatatactaaggggctggaaacatgtcggtgcagttggatatgttctcttgcatctccctcatcaccagccagcctatcataggaggatgacagagatggaacagagccacaccagccaacccacagagtgacgcaaagtcatctcagccactgcaggcaaagcagagccgctccaggggacataaaactcccaggcaagagatacatatttcttgctgcatgctattcaggatttgtggttggttgttatgtggcattattatgtcaataagctaaccaacatgtcttccttctcctgacatcactctttattcctcctccaacacttttttttttttatcaaatccttgggcttgtaaaaaatttttttggcattgatttttataaatctggaggaagtttgtctccaactatattattctgtggcttcttagacaaaatatggataccctttttcaatatggcccaggtgagccacaaactctgactttcctggccttcagcatatttcaaggtaatgtgggatgatagcatggagcctacctggactatcccttctaattctattctttggatttcagctcaacgtgtgttgagctcccattctgtactaggcactaagtataagcacacaattttgaatgataagaattcaccagacaaaagagaggaaaagatcttgcaggcatgaggaacacaaagatggaagacacagccctataggttctgggaatctgaaatcttttggtgctggtggaacatgaaatatgagagtgataatgtcaggtttagcgagaaggggatagtggccagcctccaacatgacttccagtgattctcacttctggtattcacgtcctgtgtagatccttcccacactgcctcggggcggcctgtgtgaccaacagaataatgtagaagtgatggtgtgtgacttctgagactaggtcataaaacacatggatttcatctgtatcacccacactggaggacgccagccactgtgttgtaagaacatgtaggcaaccctatggagagatctatgggataaaaaattgagacattttgccaacagccagcaccaccttgccagctgtgtcagtgagatatgggaagcatattctccagccctggtcaagcctacatttgactacagatctggctgacatctggactaaaacctcatgagaaactctaagctagaaccacccccttttaattcctgacctacagacactgtgaaataatgaatgtttcttttgatggtgttaacacattttacagtatgtttcagcaaaacatcaccaatacagaaggcaaagctcagatacatgctgtcacatttgctctgctgtgtcctgtatttaggggcagccactgcaaagttattgatgaacatgatctttagctgtatcatggcactgggtggagagcaggtttgaaaagggtgagactggaagcaggacagaaaggcaggaggtttgtccaggtgagaaaagatgaaggcctgacttgcatctgatgaagtcaagacatcctgaggggagatcatgagagagaactgaggactgactggatgggtagaggagtgatggagtggtctgtgaggactggtagttttacagcacaggtgactgggcaggagacaggtcattcacagagctggtgatacaggaagacatgcagattgggcggctggaaaaatactgagttcattcctgggtgttttgagtttggggtgcttgtggggtattcaattaaacaggtctaggtggccaggctcagtggctcacgcctgtaattccagcactttgggaggccgaggtgggtggatcacgaggtcaggtgttcgaaaccaacctggccaacatggtgaaactccatctctactaaaatacaaaaactagccaggcatggcagcaggcgcctgaaattccggctactggggagggcaaggcaggagaattgcttgaacctgggagatggagaattgcttgaacctgggagatggagaattgcttgaacctaggagatggagaattgcttgaacctgggagatggagaattgcttgaacctgggagatggagtgcatcacaccatgcactccagcctgagtgacagagtgagactcagtctcaaaatataaataaataaataaataaataaataaataaataaataaataaggtctaggcacagagcttcaggtgtctgaaaaattctgtcctgatagtgtgaaatggatctacttaatgaactccggataacagagcagtggatagttttgatgctatacctgcaaataaccaaaaacagtgttagcttctagaaaatgcacctcctttaaggctcctgaatgggattttaggttatgtgaatgcttaataataataagcaacagcatctagcactttcaggaagtaattgggtaaaattacagcctctagctgatagctctctgctggtagcatctcctccccactcccaccatggtatagtcttctaaattagtagttctcaaccttggctctgcattcaaagcacctggaaaatttcatgaggattaagtggaatggtttaaaaataactgtcagatggcagatgtttgctgtcagtttcttcctgcctaaaaagtgagactacactcttacctctctccctctcctgaaccaaaggggatcctctcattgaaagagttttgtacaatgcaaaactttatttaaatatatgtatctctaaaagataactcttttaagaaacatagccacaatactatcacatctcaattatccataattcctgtatataaaatatccaatcagtattctcctgtccctcactatttgaatttgtttgttcaaattagaataaagcccaggtgcttcaattgatatgtctcctcaatctcttttaatgtatagagtctaccaccatatttctttttcccttgtaattcatttactactgaaaccaggtcatttttcttgtaaactttcagtctaggatttactgattgcatcctcatgtgttttaaaaacaaacttttaaaaaagttttacatttgcaggccaggtgcagtggctcacgcctgtaatcctaatattttaggaagtgcaggtgggaagatagctcgaggtcaggagttggagaccagcttgggcaatatactgagacctcctctatatattttttaaagttttttatatttacaggaaaagcgtggagatagtacctagagttcccattactccacctaatttactctgtaattaacatcttacattattatggtacatttcttgcaataatgaaccaattttgatacattatcattagacaaagtctataccttattcagatttatctaatccagttagtcatgtcatgtgtccttaggctagtctttgttgtgagagtttctcagactttcattgtatttcatgattgctatcaactgaatatttttgttccccctaaattcatatgttgaaatcctaactcccaatttattggcatttggaagtagggcctttgggaggtgattaggtcatgagggcaggggcctcacaaattagattagtgactttataaaagaggtgtgtacatatctacaaatatttccctatataaacatatgtagctatattaagttaaacatgagttaatactgatgtctccaactcgaatccactattacatggatcattctagtctcttcctgatattttaaaaaggggcacctttatatttcttataactggtatttaggttgagattcaacttcaattttgtgcaagaaaaattaataggaggtgatgtcttcttccatcatgaagtgcacagtaactggttgccttttcatgattttagcaaacattgatgatcattccctaggatccattaattctttaaagtttaaaaaaaattgtaaaattttgattggctccttcttctttgattagctagaatacttataaaatttcctctcatcaactatttagtagccctgaggaagagcccatataaaaaaggcaggatgggctgggcgctgtggctcacacctgtaatcccagcactttgggaggccaaggtggacagatcacatgaggtcaggagttcaaaaccaacctggccaacatagcgaaaccctgtctctactcaaaatacaaaaattagctgggcgtgatggtgggcacctgtaagcccagctactcagggaggctgaggcatgagaatcacttgaagctgggaggcagaggttgcagtgagccgagattgcgccactgcactccagcctgggtgacagagcaagactccatctcaaataaataaataaataaataaaatttaaaagcatgataaatgtttaattcttttcctcattattttaaaaatgaattggttccttagcatcctcccagactgaccacagagctatttttgattccacgtaccgccatgaacttgaagcagctttttaggtacactgctcagccctctacctccagccttgagtcctgggcattctgcctcaggatagtgaatgggggatggttggcggaggtggggaggtgaggcagaagcagagagggatttgaaagggatggcaaagttgggggttcttatgggcttccattttcttcatccagaaaaagctctggtctccaaagcattaattcctgtatagctgttgccttggcttttatagattttcatgttgccttataaatagttgagtccatctttaaaagtctcttcaagcaaccaggaaagaaagaacagcctgaagatctggaaagggcatgtttaaccctaaatccttaaaagtagctaatctaggagagaaggttacctttgaaatgctggggagaggggtagatcacctcttctccaccttggctattagttacctgaaacatctttgaaaagccacatgtccctgtattacctccacagattctgattcagttgctctggctggaacccggaaattggcagttgctatccgcttttagagcaaggtgagtgtaacatgaagccagggccatttccaagtccccagaatgatagcaggccaacatggattgtgtcacacctacagctttatcaccttgatctgcccatctgatgttagtatttggcatctccaccctgcaactcagaagactaagctaggaaaaatgatgcctaacagttttcatccctgcttgaaacactggggccttgatgagtgtggctcagttccaactcctgggtctttaacataacacacagcagcgtgtcccaaccctcgactccaagaatggatacatttattttctgccttgcactgttctaagtgctttacatatctcaacatccctaataggttggtatcatctccacttaacagatgagctgctgggatctgagagagttaagtgacttgttaagggcacaaacctgtttctgggtgggtccggactctttcccaccatatgccgtcacttacaggctgtgagtttatgcccagcccccctcaaggagctgcctcctgctttctattgcataatcaatatcgacacctggtgtaggggcgctctgcacggtggggaaggcctggcctggagtgagggatcctgcatctcagcatcaggccctgagtaggcctctgcccttgtggtagggtaacccaccctccttcatagctcagaggtctgagggggtttgagggaaagactagaaagcctaggaggcttcttctatctctcacccctcctcactcccagtcctgtgccacaggatttcactcacagctccttccacccccacccttcccctgaaaatctcactgccctgtgacttctccatgtgccacttcctgtgcgtcagatccccgcgataagctgcccactgcctgtggccgccccaattccttagaactacacttatcactgctcacccttctcctactctccccctctcagaaaatgacaccacatccaggaaactcggaaccaacactagcccagcgctccctcttccccattcactcagttaccaagtccccacagtttcaccactcaagacagttgtcagaccatggcgcctctccatccccatttccctaggataggccttggtgtctgaggccaaccctgcctcatttcctcctaacccccacccaggccttgtgctttgtgtaccaccacacccaaccaaaggtagttattacttctttggctcccagcactcaagtgagcgccccagctctcccttacctgctggcacactccagctgactccagattctgacgtaggcgtttatgtactagcctttctccaggttcagggcgctgccacaccttcagccccgccccgccccgccgcaagcccaacccagaggttgcttatggtttccctaaggttcctgggctctggacatcagtccggtctgcaagccccgccctgattggctgcctccggcaccggtcgctgcgccctgacctaaggcgcccaggttcctcccccttatccctgcagggctggtgccttgcggcaccgcccacgctcggattggtccgaggtgagattcgcccttgtgccctcgtaggccttcggaacagcggaagagcagtgtcgggccatggccagggcccgcaggctggagctggccgaggccctggcgctggggccaggctagaggcatgcctgctatgcgctcctgcacgcgccggaccctggaattctctctggccgcctccctctgcgctacgccatactggtgaggagggcgcgcgcccggccactctccgctctggccttgcaccttccttgcggcgctactctcgggtgtccctgccaatcccagcttcctcctctctcagatgcagatgcgctttgatgggcgcctgggcttccctggcggattcgtggactcgcaagacagcagcctggaggacgggctgaaccgtggtctgctggaactgctgggcgaggcggcggccgccttccgcgtggagcgccctgactaccgcagctctcacgccggatcaaggccacgtgttgtggcccacttctatgccaaatctctgacgctcgagcagctgttggctgtggaggccagcgcaacaggggccaaggaccacgggctggaggtggggccagtctgggaccctgccccatatcttattccttttccttccatgtcttcctttgcctcagcaactctttttggattgaggtccccgtctgtcagaacttgccctcttccccattttcttggtggagttgggatcttggtcttctcttattgaatggtactgccaacctaggcttcctgggaagatttccacccacctcgccctttactgggctctggagagatttttctagaacacacatatctacatctctctgctgctctctattgataatgtgaaaatggccaggcatctaccctagtcccttattgttgggcctctgtttctcttaggaagaagatatggccctaatacttaaggccctaatacttaaggccagggagacagattgtatatggaggtagttctcaaattttgtcaagtatcagaatcatctctgaggcttataaaaacaaaaatgactagattctactcccagaacgctggttgtgggtgagaaagccccagcttccaccactcccaagttctgggagggcaggggttcagaaatctgagattgcttttttcaaaagttcccaagtgatgctgataacgctggtctaggtttcccattttgagaaccattgttgcagggctaagcatgaattttggcgttaggagccactagaggtgtaggggacagaagtcataaggattaacattgatggagctggatagcatgtcttgggtcatttgtctgcagagggttgagcccactgggcctcctttagataggagccttgggcttgtttctgctggagtattaagagttgtggcatctgctctagaaagatctgctaaagagaggatggaggtagtgacatgagctacctggagtcccagtgtctcctgtctccttccttttacaggtgctgggcctggtgtgagtgcccctgtaccctgcatgatggtgtgggaggcctgcccatctttctggagaattgctttattggtgctgcctgggagcagttactggataccctccaggacttgggagtggtggaagctggtgctttctcaggacttcagatcccagttcgtctgaggcaaccctctgtggactcagggaacctgagctgaggactttggtacaaggaagggaatgttttctcttccggacctaaagacgataccaaattaaaagaagacatgtatatcatatgttttgagcagaggaccctccaattcatgggatcaggggcaaaaatccacagctcatcccaggggccctggcaggttctcagagcctacctcttccttgtatatttgcatacagcctggtaacccccaggcatgcatatgtacaatgtgaccacacacagcctgacatctttcacctgtcaagtccaatttaaccaggaattggcatttgttaccataccctgcctcttgctttgcagagagcttctacagcaaggctgagtccttcccacagtcctccatgcctgctctttagggtctaccccagcccatgttttttgggaaggatagagaagcagaggaccctctttgctttcctgaaagtagccatgcccttgctggagggttcaccacagcaattggtgggaaagggtcttaaccaatctccaacacttttcttctcctgaaactgagaaggggtaaggaagtagctaggtccccttggacggagcatggacatgagacctgtgagtactggtgtctctccttcagagctttcatctttggttcgctgtagactctgggactatcagaagagaactgacccatacctgtctagccctgcccttccaaaaaaagagcctcccattaaagaggagttagagctgggccttgaggctcttcacttctttcaacagatatttaatatgtacctactaaatgccaggtactataaaaggtatagagagccatccttgctctccaagactccagggaagggatgggcaaacattttcttaaaagccagatagcaaatactttaagctttgtaaactacatagttttttaaaaaatattttctaacattgactaataaaaattgcctatgtttactgtgtacaaaatgatgctttcaaatatgtatacattgtggcgtggctaaattgagctaattaacatatgcattacctcacatatttatcatctttcatggtaagaacacaaaatttactcttagcaattttcacaaattaatgcagtttattaactatagtcaccatttgtgcaacagatcttttgaacttatttctcctaactgaagttttatattcttcgatcaatatcttctcaattactgttccctacccccaacccctagtaaccattattttactctctgtttctatgtgtttaacttttttagatgccatatataagtgaaatcatgtggtattttcacctggcttatttcatttaacatgtcatctaggttaatccatgttgtcacaaatgacagaattttcttctattttaaggccaaatagtattccattgtgtatatataccacattttctttatctgtttatctgttgatggacacttaggttgattccacatcttggctattgtgaatagtgttgcagtgaacatgggagtgcagctatctctccagatcctaatttcaattactttgaataaataccctgtaatgggattcctggaccatatagtagttctttatttttaaatatctccatgctgttttccatgatgaccatactaatgtacatttccaccaatattgtgtaagcattcccttttcatattttctctaatacttacctttcatctttttaatcatagccattctaacagatatggggtgatattccatagtggttttgattttcatttccctaataattagtgatgttgagcattttttcatacacctatttgcctttctttgagaaatgtctattcaggtcatctgcctcatttttaattgggttatgtgttttcttgctattgagttgttcatgttccttatatattttggctattaacctctcatcagttgtgtgatttgaagttattttttcccattctatagattgtccctttactgtgttgactgtttcctgtgctgtgcagaaagttttagtttgacataatcccatttgtctattcttgttgttgttgcctgtgcttttgaagtcttatccaaaaaaatcattgtccagaccaatgtcatggagcttttcccctgttttctgtagctttacagtttcaggtcttgcatttaagtctttaatctattttgagtttattttttatatggtatgagataaggttctaattttattcttctgcacagaaatatgcagttgtcccaacaccatttattgaagggattatcttttcctcattgtgtattcttaccctctgtggaaaatcaattgaccataaatgtgtggatttatttccaagatctctattctgttccattggtctgtgtgtctgtttttatgacagtaccatgccgttttggttactatagctttatgatatattgtgaagtcaagcaatgtgatacctctagctttgttgttttggttaagattttttggctagtcaaggtttttttgtagtttcatatgaatctttgaattgcttttctatttctttgaaaaaagtcattggaattttgatagggattgcattgaatctgcagattgctttgagtaatatggacattttaacaacataaattcttccagttcattaacaagggatttgttttcatttatttgttgggccatttatttgtgtcttcttcaattcctttttttttttttgagacagagtctcactttgtcgcccaggattgagtgcagtggcaccatcttggctcactgtaacctcctcccaggttcaagcaagtctcctgcctcagcttcctgagtagctggaactacaggcatgcaccatcatgcccaactaatttttgtatttttactagagatggggttttgccatgttggccaggctggtctccaacttctgacctcaggtgatccacccaccttggcctcccagagtgctgggattataggcatgagccaccccacctggctttcaaggtcttggaagacctaccaagtctgggtaggacttccagtactgtgttgcatccttctcttatttataatcttagaggaaaagctttcaactttttaccattgagtatgatgtcagctgtgtgtgggtcatatatggcctttattatgctgaggtacatttcttctatacctaatgtgttgagagtttttatcatgaaaggatgttaaattttatcagatgtatctattgggatgattacatgttttttatccattctgttaataggatgaatcacattgatttgcatttgttgacaaggtctatccttgcatcccaggaataaatcccatttgatcagggtgactgatccttttcgtgtgctgttgaattcagtttgctagcattttttgtttgagatttttgcatctgtgttcatcaggcatattgacctatagtttccttttcctgtagtgtctttggctttagcatcagggtaatgctggcctcataaaatgaatttggaagtatttactcttcttcagttttttgaagaatttgagaggaattgttctttaaatttttggtagaattcagcaatgaaaccatcaggtcctaggcttttcttttatgggaaagcatttcttattaatgcatctacgtgttattggtctgattagattttatttttcttcatgattccgtattggtagaattatgtgtgtctaggaatttatctgtttcttctaggttattcaatttgttggcatatacttgtttacagtagcctctggtggtcttttgcatttctgtagtatcagttctgatgtttcctctttattttatttgaatcatctcttttttcttagtcttgataaaggtttgtgaattttgtttatcttttcaaaaagccaacttcttagtctcattgacctattgtttttctagtctctatttcattcatttctactctgatctttattattttctttttctaactttaggcttagtttgttctttaggcttagtttgttcttagtttgttctagttccttgaggtgtactcttaggttatttatttaggtcatttttcttttcaatgttagtgtttaatcccataaacttccctcttagacctgattttgctgcatcacataggttttggtatgttgtgtccccatttttatttatcttaaggtaatttttaatttcccttttaatatcttctttgacccattgattgttcaggagcatgttgtttcatttccatgtatttgtgaattttctgaaattcctcctgttattgatttccagttttatgccattgtggttggaaaatatacttgatatgattttaatatcactaaatttgttaagtctgatgttttatttactttttttctgtatgatttgtccattgctgaaagtggggtattaaagtcttctactattattgtattacagtctgtctctctcttgagatttattcatatttgctttatatatttaggtgctctgatgttgggtgcatacgtatttataattgttatatccttttaatgaattgacctctttctggttatataaagatcttcttttgtctcttttcagtttttgactttaagtctatttgaagtaattatatctacatatagatatgtagatttcccttaatctcttttagtttccacttgcatggaatatttttttagactccatttcttgatgggggcgatgaggaatagggcagaggactagcaaataactggtagtcaactttaacctactaaagtatggtctataaatggaaaaggccatgtgggcacaccagagtaagaggagatcaaggtggagatgtaggtgggagtctgatgagataggacctcacaggccatgtgaggggcttggagtatgctttggggaagtcactcctgatgttgtgtggaacacggactggaagggctagtagaggaaggaggagacagagggagctgccacatagctacatggcagatggtggtgatctggagcagggaggggcagtggagatgggcagaaaggatgtgattgcgtgagatattggtggtggcattgacaagacctactgatggactggttgtgggaggaagggagtaaggaagaaagaagattcaaagatgacttttatgtttgtgtcttaaggcgttgatattgaggatgtagggaaagcctggtgggtgggggaataagcttttgaaagagacaggatcaaggaagacattctgggcaggttaagacaaatttgtgatttgtctgcataaaggtgatagaaaaacttagactgggtgaggtgatccataaagagagaaaaagagtgctcaggacaaggccctgaggaagcccaacccccagagtttgggcagagggacagggcatgtaaaaggagaagaggaggagagaaagctgcttttagaaagtagactatgcagagtgcttgtgagggtttaggtagaacggaggcagaactgtacactgaattcagtaatatgagggtttgatgaccgtgatggcaacaatttcaaaaagggtggcatagaggacagactcaattggttgagtgaatggaaaatgagggagcagaaggtaggacaagctggccctaaaggggcttagggtgatcactagagagggctgtcgggtcagggagtgtttaaggtgggagacagggcatgtggatgttgatggcaacagttaagatggcaagaggaaacagatgggagggtgatcaggaggaggacccctgaagaggcatcgtccatgagaaaaaaggagggatgggacctttgtaggaggagggacaggcctgcagcgtaacagggctcaaggaaaacaggaatgaggcacgcatagaggattatgatggctaaattgatgggaagatgatagaatttgaatctcttcttggtgaaatgaagtgagactatcagctagctgtgggtggagcatgttctcagaaggtatgaagtaaacattcactttggtgtgaaaaagcaagttaaggaaacagcagaagggcagagcaaggctgagctctgagatgctcagtttagagtaggatgctgggcactcaggtgtgtgtgtgttgagtggggatctgcatgcacctgtcttcccccaattaggattcaggatctgggatggagatgcttactgcagtgttggggttttgccaggggagtataggaggtgagagaaagatggggcagttcagatgacatgcacaggagaaactgtagtgatgaaatgtgtggtctgaggattaatctgaccaagatggaaattgaaaactggaggtgactagggagggattaggaaattagaggtcttgacgaggtagaaactccagcatggtgaggggctgggtggggaggtgtatttgagccagacaggagtgctttggaaattgagaggtggagcaatctcaggaaaaggcagtcaagggtatgacctggagttgctggccagagccagaggaagaggcttaagaggtgagatctggggttagccagactagagggcagatgttggggaggatagtgtgacctagaagccagtgtccttggtgaaccacaaggccagtggcacctgccagaggggaaaacaagcatgacaggatagtgccttccaggcaagggccttttgaggaagggagggtaagcagtggtctggaaactaaatgcagagcaatgtggttcccactggcagcccttggtcttgggaaaatgggagtggctggtgggggaacagctgtacagattaggtagatagatagactcctggtggggtaaattaccttcttctccttaatgtcaccatgacccctttgtcaaacgttatctagattaaacctcagtataggcaggctgcaggaaatggacattccagtggctcccggggtcccagcctgcagcagcttcatctgtgctttgtgcacttggctctcagttatctctgcaagggaccctgaagactgggagatcagagtcactcaccattgatgacactgctaatagatcccttgcctgaggatccggtcctaggcaattctggacccagaactcattctggatgtaatccaggtcaacgttaataccatttggaaggttcctttacagcactcagtcttactctgcttgagtatcccagtgatcagtcccttttattaaatttgttttttatttaggtgtctggagatggctgaggagcccatgactttcctgtatgatcccttgaacgtaacttccaagtcagtagatttcttctcaggtagctttcataaaagtgtttaattgttgtcagttttgagttcatctcaccacctagaccttacagtccctgggtaggcaggcagtgggcgatagaagctcacactctatacttctcctcttactcattcccaccctgctgaggtttaaggaaagccaaggatcaggacccacttaagctttccttggccttgttaagtccaatcatctggggcgggaagaagagaaatgctcattgcaatctttgacccccactaactgctgtggtgactttgagccaagcccttgacctccatttccttatctgcaatgttgctgtgattcgtgtggtgaggttagagaggcagcacttgggataagcttgaagagatgcatccagccatatgaaagtacaggatgccgtgtgtgcttcctgcttcatagcacgttttgtttcttggaaggtgagtggcccggctgcctccccgcaaacacatatttctgcctttctcattgtaattagcaagatgttcccacttctcagcattgcacttttcccttgagtctgctagctgctggtgcagaataaacactttggccccacactgtcctgagacaaagtcacccagcatatggcaaagctgctacttctcggctggaacatttgaggcaacagtgacttcctccttccccagttacctggacgctcagagccggccagtgaaacatacaaagggaggggaagagaagagggaagccatgtttcagtttcagtttatttcacagaaatgttttgaaatcctttatctctaatggaagcacaaacgggtgtgggggagtcaaaaatgggggaaaaatttagtctgtaagcaaatcattggatggcatcagaatttgagccagggtaaaaatgctggaccttggcccttagacagagaagtgcagaagaactcaggttgggggattctatttaaaacatgttcagttctgaggaagaggagtatgggcagggcagaggaaaaatgtaaaatgggaaactccctcatggacttaaggccccagcagagagaaaccatgtgctttctccctgcttccccgcttcccttctgacttgggcaaatgaggcagttcatgctccccttagggctggaggcagtctgcaggggccagctgggcagagaagaagtcttctcacaggcagcactcacactccaaaagcaagaatagcagtgggactttgggaaggacacgaaacaggaaaaggaagctccacaccaacagctccctgatgaagggagtctgtgtgcctaggcttttcacgaaagtgctgctatcctgatttaaatctgagctgcacccctgtctccccacctaggaactcaccatgggcattctcagctgtggcagaggataccctcctttcattcaggataacaacccctgggtggggttttcaacaagtataaaaagctcctggataaacaaatcccaaacaggactctcacccacagtcccagtcctctcaccttcttcaggtatctgaaaaacggaaccaatgggtttacaacatcctgttatccagcatcctgttattacaacatcctgtaattccaggctgtggatgtagggaaaagccaggtaaacagggaggggagaacaggtgaatgaccccaatggtttgagagcaaaagagcagaataattgcctctgattaagtaaacagcaagtaatattaataggtctgttccagaaatactacaaaatggaagagtatgtgagcacccgatgcacgtgataaagaccatgctctggaagatccattccaaggagtagaagcggtatttgctcagggcatttaaggagagcacagactctggaatgaggtgaaagaaaagataggacatgcaggaacagctggcaacaccaagaaaggatttaaggagagggatctctctgttagagaacttaacgttaccctagaaacagcaagagcatcatcagccccaggaaaatctacctctgatgtggggaccaggcttaagaaaatcccctagaatccagagaaaaagtgcaaaacaaggaaaatggctaaagaaaatatcgtagatatagagatcagacaatgagaatccagagtcttgttaagtgatggaagaaaaatattaacagaacacatgtaacacgaacaacattttagaggaaacaagaagaaaagtttcctaaactcaaaagatactacaccagaagtgggcagtactcactatgttcaggggaacaaaaagataaaaactaaaaaacaacttcagaatgtttttcattgaaaaacatttgtaaggtaggagaattaggccacttactacagcacaaactgcatgtctatctaaattgatgtgcaaaagcatgggtatgcttggatttactggaaaaccatacaggtgtttttcaggaatgcacaaaatgaatcaaagtaactaactgatcaggaaaattgtgtaagaaatctgtgagctggttgtgaggcagcgggtcctattatgtacaaatttaatgctaagttactgtgttatggctatcaatatgttaccaatacatggaaatgtatgtaatataaaaaataatttgattaacatgatagccccacaattctaggtcattccatgaaaattagataatagggagtatggggaagaagaataaaaatgtgctaattatgctgaggggatgagtagcatgatttagtttttgaagatgataagagtctttgtgaaattttactactttaagggacatatcaaagcaatagattctgctgaatatgaaagaatgggaaagaatgtcagggaattacagtcaaaggtaagaaatcatcataatattaatatcaaaattgaatgtcaaatgcattagaattctttaattgactagaagattatctacaatgatcatataattaccaccaacttcagattatatatagcatgatctgcaaatgtaggatgaaattaataaaatagattgaggagtgcaaacacacttcctttggtgtttgacagataaaatgtcagctttttttttttttttttgagatggaatctcgctctgttgcctagctggagtgcagtggtgcgatctccgctcactgcaacctctgcctcccaggttcaagcgattctcctgcctcagtctcccaagtagctgggaccacaggcacccaccaccgcacctggctaatttttttgtatttttagtagaaacagggtttcaccgtgttagccaggatggtctcgatctcccgacctcatgatccgcctgcctcagcctcccaaagtgctgggattaccggcgtaagccaccgtacctggccaaaatgtcagcttctaagtatgcatatctggatctaaagagaataaaaatgacgatgatgatgaaaacaattaacatttgggggatatttactgtgtggcaggcactattataagttattttcatgtattaacatatttagtccttaggacaaccttatgatatagggatactattatctctatactccaaatagacccagcacaaaggccaaaaatgtaattgatatactttgcctaacagataaatattgcactctggaacttcagagaatatatctttacgggctcaggaagcatttaccaaattagccatatattggaccttatcaaacctcagcaaatcttctcgaatcttctagtccctctcagaaatcatagatcacattgttctagactacctcatttagtaaaactagaaatatgtgacagggatagaaactctgaaatggtcttctttatgtgttttcttattgtttgaatcttatacaatatgtatgtattctatggtcataaaacaacagttaaaaagtaaaaaattttttccttatatgtatacagaaagtagccctaataaatcaaaaagcaaaacaaaaaaggattcatgggtgggcaaggatccatcccaggaagaatactggggtaatttgtggagttgaggaaagatctcttctccagcctgaaatgaacaaaatcagagcagagcctgcctgcctgagtctgagccatgtgctcacatggattgccctgtgctgattggaatatgtggtctgactggtcaggcctggatcctctgccctcattgtggctaggggagtggagagctgtggttggcaatcccaccagatcaagatttggggaagcagcagttctctaagggaggaggcagtatatagcacaaacacctgatgtccgccgcagggggaaaaacaaggccaggtattctacctacctacccttttgttccaataggcatgcgtgattccttaattctttggtgtatgaactacaggtctactatcttcaaccataatacttgctccatggtactatgcagtctccacaaggatcataatattccattgagatgtgtcacctgcatttcaatcacctcctctttagtttcttaccctccaaaccaaccagagctaagaaagccattttgatctcaggctactggcgctgcatttcccactcttctttccccttgttactacccatcaccctcccaccgctccacccctccacgttttacctcattaactttgagtctgtctcagttttagtgtcatttcctaagggaagcattctttatactttgaccttccagaccagattaatttcacccatgtaccttttcttcaagtcactcattgccaattcaaatcattcatttgtatgtgactttttgattagtatttttgtcctcatatactcatcaatgttcttggatagaaacaatagaaatcattgggtgcggtgtctcacgcctgtcatcttagcactttgagaggccaaggcagccggatcacttgaggtccggagttcgagaccatcctggccaacatggcaaaaccccatctctactaaaaacacaaaaattagccgggcatggtggcatgcacctgtaattccagctagtcaggaggctgaggcaggagaattgcttgaacctgggaagtagaggctgccatgagccaagattgtgccattgcactccagcctgggtgacagagcaagactctgcctcaaaaaaaaaaagaaaaaaaaagaaagaaacaatagaaatggattatggtatatttatgacaaaatttaatttattggaaaggtattaggaagctcacagttttaatgggaagctggagaacaaggatgaggcagggatgagggttggtgaggcacagccagcatctcgctagggatagtgggcttaggatgctgccacccgagccttctaaactggatacttaccattgtgctactggaaccaacaccactggcactcattactggcctactgaacccttaactctgatcatataccttgtgtcacttctccaaaatcaacatcctgagcaggagcatctcactggctgtgctttggttataagcctcctttcagttacccaagggccagagagggaatatctgcccactgttactttcatagcagaagaggggctttgcttattagcattcttttcaatggcccagaattggaaacaaccaaaatgtctctcaataggtgaatttccctgacaagaagtcttttgtgataagccccaaatggctctagctggttgctctctgctggtggaacctccttccccttctcccatagtatatttgtctaaatcagtggttctcaaccttagctctgcattcaaagcatctggaaaatctgatggggattaagtggactggtttaaaattacctggcagatggtagatggtggtttgtagtcttcttcctgcttaaaaagtaagaccagacccttacctctctctccctctccttgaccaaagggattctgtgaaagaattttgtgaaatgcaaagttttattcaagtgtaaatgacaacttttacctttacttcatgagatgccaaagatctttttatttttaactttttactatggaaacatcaagctatataaaagtaaaagtaagcagaataacataagtccttaatagatccatcatcacccagcttcaaaaattatcaattcatggccaattttactataacttcagcctctgccccttcattgaattatttttatcatgtcattcacaaatgttttagtatgtatctctaacagataaagaaccctaacaaaacagccaccatactattagcacctcaaacaatgatcactaagtttgtttggacaaattaggaatcaaataaaccaactgcttcaattgatatgttttctcaatctcttaatgtatagattctgccaccatgccttttttccctttgtaatttatttattaaataaatcaggtcatttttcctttaaatttttgttcagtttatatttcactgtttgtattctcctgatttaaaacaaacctattttttagaagttttacatatacagaaaatttataaaaatagtacagagttcccatacactctacctactttaccctataattaacatctacattattataaaacatttcttataataataaatcaattttgatacagtatcgtcaaccaaaatctatgctttattcagatttccttagtttttctctaatgtcctttttcttctccaggataccacattccatttagacatgttatgtgttcttaggctcatctttgctgtgagaatttctcagactttcattatacttcatgattcctatagactgaatatttttcttctcaaattcttatgttgaaatcctaactccaattgtgttggtatttggaagtagggcctttgaaaagttattaggtcatgaggacagagctctcatgactgaaattagtgactttataaaagagactctagagagctccctcaccccttctcacacatgaggtttcagcacaagactatcttctatgatcccagaagtggaccctcagtaggcacccaatctaccagtacccggatcttgtacttctcaggccccagaactgggagaaatcaagtatttgttgtttctaagccacccaatctgtggtattttgttccagcagccctaatggactaagacaataacaattttgaggcttactggttgggtattgtgtagaatgtcccttcactgggatttgcttggtgcttttctcatggttagagagggattatatctttttgagggaaaaccacagacaaaagtaccattttcattacttcatattaagggtgcattctaccaacatgacttgtcaatgatgattttgaccttgatcacgtgttcaaggtagtgtttgtcaggtttctccacaaagttactcctttcttctcctgttttcttactgtactctttggaaggaagtcattattcacaacccacaaggagtggggagctatgctccacctccttgagggcagagtagctacatgaattatttccagttcttctgcacgggatatttttctcttctcctccatttatttactaacacattttcattatttatttgtattatcagtatgggcctgtagatatttatttgatacttcaagttataatccaatactacttattttgttgctcaaattctttcagctttggccactaggaactttttcagctggtccctgtgtctctgtttctttgatatacctccatcagtatcgatttttgtccttttttatttggtgaacttccttaatttctggcatcacaagatgctttaggcttattgtatatccatgttgcatatttcctggcccaatgttagaatcagccatttctccaaagggctttgattccttttatggaaaatggtattagaaaccaaaatgtggcagttggtgtgtttgttgctactggaatatcattgcttctaagcccactcagctgacagaggaaggaaatatctgtgcacactaacctttgtatgtatacatatatgtgtgcatgtatgtatgtgtatatatatagccatatctacatcaagctaaaaatgaattcatactgatgtttcaaactctaatctattactacatagatcattctagtctcttcctaatattttaaataggtattcctttgaatttcttataaattgttagatcaagatgacagttcaatattttggcagagataatccaaaggaggtagtgtgctcttttatcacaatgtgtataacaactgtctattcatgatgttagcaaccaatgatgatcattccctagattccattaattctttaaagtttaacaaatgttaaaattttgattggctctgtccttcctctttgattacctggaatactttgtgaaataaatttcctctcattaactatttggtggccctgaggaagagctcatataaaaaaggcaggataaatgcttagttcttttcattattatttttaaaataatagattggttttctagaatcttcccatgctgactacagagttatttttggttccaggtaccattatgaacttggaacagctctttaggtacatggctcagccctctacctgcagccttgagtcctgggcattctgccttaggatagtggaatgggggatggttggtgggggtggggcagaggcagagaaggatttgaaagggatggcaaggttgggggctctaaaggacttccatattcatcatattcatctagaaaaagctctggtctccaaaatcatgaaaactcgtacagctgttgccttggttttacagtttttcatgttgcctttgaaatctttgaagtcatcttgaaaagtccatctttaaagtctcaagtaaccaggaaagaaagaacagcttgaagatctggaaagggcatgtttgatcctaaatcattaaaggtagcctatctaggagaaaaaccaagtcgcctttggaatgctagtggaagggggaaggccccggttctccaccctggttattagttacctaaaacatattttaaaaaccgcatatgtccctgtaggaccccatacattctgattcaactggtctgtggtaggaaaaagtggcagcttttaaaaatttttagaagctttttgcgaggtgactctaatgttaaagcagggctatttccaaaccccctggaactctagcaggccagtgacaattgtatcacacctacagactcatcactttaatgcagttgcttcatgttattagataatatccctgccccacaacgcagaagactaagctaggaaagatgatgtcatacagctcatccctccttcaaacactggagcgtgatgagtgcagctcagttccaacacttgggtctttatttattattattattttttgtagagacggggtctcgctatgttgcccagactggtctcaaattcatgaccttgaatgatcctctcacctcgcctctcacagtgctgggattataggtatgtgcccagccctggctcctcaacgtaagacatagcactgtgccccaaccctcaactccaagaatggctacatttactttctgcctggcactgttctaagtgcctaacatatctcaacatccctaataggttggtatcatctccacttaacagatgagctgctgggatctgagagagttaagtgacttgttaaggtcacaaacctgtttctgggtgggtccggactctttcccaccatatgccgtcacttacaggctgtgagtttatgcccagcccccctcaaggagctgcctcctgctttctattgcataatcaatatcgacacctggtgtaggggcgctctgcagggtggggaaggcctggcctggagtgagggatcctgcatctcagcatcaggccctgagtaggcctctgcccttgtggtagggtaacccaccctccttcatagctcagaggtctgagggggtttgagggaaagactagaaagcctaggaggcttcttctatctctcacccctcctcactcccagtcctgtgccacaggatttcactcacagctccttccacccccacccttcccctgaaaatctcactgccctgtgacttctctatgtgccactccctgtgcgtcagacccccacgatcagctgcccactgcctatggccaccccaattccttagaactacacttatcactgctcacccttctcctactctccccctctcagaaaatgacaccacatccaggaaactcggaaccaccactagcccagcgctccctcttccccattcactcagtcaccaagtcccctcaatttcaccactcaagatagttgtcagaccatggcgcctgtccatctccatttccctaggataggccttggtgtctgaggccaaccctgcctcatttcctcctaacccccacccaggccttgtgctttgtgtaccaccacacccaaccaaaggtagttattacttctttggctcccagcactcaactgagcgccccagctcttcctcacctgccgggacactccagctgactccagattgcgacgcaggcgtttacgtaccagcctttctccaggttcagggcgctgccacatcttcagccccgacccgccgcaagtctcatttcctcctaaccccaacccaggccttgtgctttgtgtaccaccgaacccaaccaaagctagttccctgacttgctcttttggctcccaggagcctttaggtaccggccttgcgccaggtttagggcgcggccacacctctagccccgccccaccgcaggcccaacccagaggctgctttcggttaccctagggttcctgggccctggacttcaacccggtctgcaagccccgccctgattagctgcctcccgcaccggtcgcggcgccccgcccccaggcgcctaggttcctccccttatccctgcagggattgggccttgcagcaccgcccaggctcggattggtccgaggtgagacccgcccctctgcccattgggccttcgggacagcagaggagcagtgtccggccatggccggagcccgcaggctggagctaggcgaggccctggcgctggggtcgggctggcgtcatgcgtgccacgctctcctctacgcgccggaccctgggatgctcttcggccgcatcccgctgcgctacgccatactggtgagaagggggcgcgcccggccactttctgcctgagccccgcaccctctctggtggtctcctctggggcgcccctgccaatccccgcttccccctcccgcagatgcagatgcgcttcgatggacgcctgggcttccccggcggattcgtggacacgcaggacagaagcctagaggacgggctgaaccgcgagctgcgcgaggagctgggcgaagcggctgccgctttccgcgtggagcgcactgactaccgcagctcccacgtcgggtcagggccacgcgttgtggcccacttctatgccaagcgtctgacgctcgaggagctgttggctgtggaggccggcgcaacacgcgccaaggaccacgggctggaggtgggaccagcctgggactctgtccctttcccaatttcctcttctcccaaagctttctctcccccaagaaagcatccctggagaaaagtctttgcccctctgaccttgccctctccccagctttcttggtggagttgggatcgtgatcatctatactctgaattagtactgccaacctgggctttctgtaaaggtctttcccaccctttaccaggagagatcctttctagaacacactcatccatgtctctctgctgttccctattgacagtgtgatagattatcacattatctaggtgtggcaacctaggttttattcttggggtttgcttttcttgtgtaggagatgtggccctgatatttcaggcagggctagtagatagattatgtatgaaggtggttctcaaaatttggcaggtagcagaatcatcggggcgtcttattaaaatagcgatttctctcagcattcctgcattggtggtggggcggggggagaggaaacctgagaatttgtagttttcaaaagttcccaaataatgctgatgcaaataatctgaggaccacattttgacaaccactggtgaaagggtatgaatacatctttgaggcagtagccactagaggtttagaagcagatgtgggaaagattaattgatagag
